United States Patent Application Publication US 2004/0052799 A1 - sequence listing, part 3

SEQ ID NO: 6856 - protein, 289 aa, Helicobacter pylori
  misc_feature (B) LOCATION 1...289
  hypothetical: YES
EMILVLDFGSQYTQLIARRLRESGIYAEIVPFFESVENIQKKAPKGLILSGGPASVYAKDAYKPSEKIFDLNLPILGICYGMQYLVDFFGGVVAYANEQEFGKAILEIVQNSVIFEGVKIKSLVWMSHMDKVIELPKGFTTLAKSPNSPYCAIESDKIFGLQFHPEVIQSEEGGKILENFALLVCGCEKTWGMQHFAQREIVRLKEKIANAKVLCAVSGGVDSTVVATLLHRAIKDNLIAVFVDHGLLRKNEKEKVQAMFKDLQIPLNTIDAKEVFLSKLKGVSEPELK

SEQ ID NO: 6857 - protein, 508 aa, Helicobacter pylori
  misc_feature (B) LOCATION 1...508
  hypothetical: YES
MILVLDFGSQYTQLIARRLRESGIYAEIVPFFESVENIQKKAPKGLILSGGPASVYAKDAYKPSEKIFDLNLPILGICYGMQYLVDFFGGVVAYANEQEFGKAILEIVQNSVIFEGVKIKSLVWMSHMDKVIELPKGFTTLAKSPNSPYCAIESDKIFGLQFHPEVIQSEEGGKILENFALLVCGCEKTWGMQHFAQREIVRLKEKIANAKVLCAVSGGVDSTVVATLLHRAIKDNLIAVFVDHGLLRKNEKEKVQAMFKDLQIPLNTIDAKEVFLSKLKGVSEPELKRKIIGETFIEVFEKEAKKHHLKGKIEFLAQGTLYPDVIESVSVKGPSKVIKTHHNVGGLPEWMDFKLIEPLRELFKDEVRLLGKELGVSQDFLMRHPFPGPGLAIRILGEINENKIKRLQEADAIFIEELKKANLYDKVWQAFCVLLNVNSVGVMGDNRTYENAICLRAVNASDGMTASFSFLEHSFLEKVSNRITNEVNGINRVVYDITSKPPGTIEWE

SEQ ID NO: 6858 - protein, 433 aa, Helicobacter pylori
  misc_feature (B) LOCATION 1...433
  hypothetical: YES
MLSVIILAAGKGTRMHSSLPKTLHTICGEPMLFYILEVAFSISNDVHLVLHHQQERIKEAVSKRFKGVIFHAQIVEKYSGTGGAIMQENKTPIPTQHERVLILNADMPLITKDALTPLLESHNNAIGLLHLADPKGYGRVILENHQVKKIVEEKDANDEEKTIKSVNAGVYFFERKFLERYLPKLHDQNAQKEYYLTDLIALGIKGNEKIDAIFLEEECFLGVNSQTERAKAEEIMLERLRKNAMDLGVVMQLPSSIYLEKGVSFKGECVLEQGVRLIGNCLIENARIKAYSVIEESQIINSSVGPFAHARPKSVICDSHVGNFVETKNAKLQGTKAGHLSYLGDCEIGKNTNVGAGVITCNYDGKKKHQTIIGENVFIGSDSQLVAPINIGSNVLIGSGTTITKDIPSGSLSLSRTPQTNIENGYFKFFKKP

SEQ ID NO: 6859 - protein, 436 aa, Helicobacter pylori
  misc_feature (B) LOCATION 1...436
  hypothetical: YES
RILMLSVIILATGKGTRMHFSLPKTLHTICGEPMLFYILEVAFSISNDVHLVLHHQQERIKEAVSKRFKGVIFHAQIVEKYSGTGGAIMQENKTPIPTQHERVLILNADMPLITKDALTPLLESHNNAIGLLHLADPKGYGRVILENHQVKKIVEEKDANDEEKTIKSVNAGVYFFERKFLERYLPKLHDQNAQKEYYLTDLIALGIKGNEKIDAIFLEEECFLGVNSQTERAKAEEIMLERLRKNAMDLGVVMQLPSSIYLEKGVSFKGECVLEQGVRLIGNCLIENARIKAYSVIEESQIINSSVGPFAHARPKSVICDSHVGNFVETKNAKLQGTKAGHLSYLGDCEIGKNTNVGAGVITCNYDGKKKHQTIIGENVFIGSDSQLVAPINIGSNVLIGSGTTITKDIPSGSLSLSRTPQTNIENGYFKFFKKP

SEQ ID NO: 6860 - protein, 111 aa, Helicobacter pylori
  misc_feature (B) LOCATION 1...111
  hypothetical: YES
KPRVENEILGLNFPNHLGLPAGFDKNAFHAQGVNHFRVWLFGSRHITNIAQSGNEKPRLFRHIEEESLQNAMGFNNYGAILGVRAFNRFAPYKTPIGINLGKNKHIEQRMP

SEQ ID NO: 6861 - protein, 144 aa, Helicobacter pylori
  misc_feature (B) LOCATION 1...144
  hypothetical: YES
NPYWHQFRQKQTHRAAHALEDYQAVLNQCLNIGDYYTFNLSSPNTPNLRDLQNKVFVNELFCMAKEMTHKPLFLKIAPDLEIDSMLEVVNSAIEAGANGIIATNTTIDKSLVFAPKEMGGLSGKCLTKKSREIFKELAKAFFNK

SEQ ID NO: 6862 - protein, 143 aa, Helicobacter pylori
  misc_feature (B) LOCATION 1...143
  hypothetical: YES
NPYWHQFRQKQTHRAAHALEDYQAVLNQCLNIGDYYTFNLSSPNTPNLRDLQNKVFVNELFCMAKEMTHKPLFLKIAPDLEIDSMLEVVNSAIEAGANGIIATNTTIDKSLVFAPKEMGGLSGKCLTKKSREIFKELAKAFFN

SEQ ID NO: 6863 - protein, 210 aa, Helicobacter pylori
  misc_feature (B) LOCATION 1...210
  hypothetical: YES
MLRALIAFGFGYLEAGTLTNIAQSGNEKPRLFRHIEEESLQNAMGFNNYGAILGVRAFNRFAPYKTPIGINLGKNKHIEQAHALEDYQAVLNQCLNIGDYYTFNLSSPNTPNLRDLQNKVFVNELFCMAKEMTHKPLFLKIAPDLEIDSMLEVVNSAIEAGANGIIATNTTIDKSLVFAPKEMGGLSGKCLTKKSREIFKELAKAFFNKS

SEQ ID NO: 6864 - protein, 77 aa, Helicobacter pylori
  misc_feature (B) LOCATION 1...77
  hypothetical: YES
GVSAMKARGFKTKMRGFKIFSGSAPPAFGKEVSKHLGFPLSKAVIGKFSDGEINIQISESVRGKDIFIIQPTCVPDQ

SEQ ID NO: 6865 - protein, 277 aa, Helicobacter pylori
  misc_feature (B) LOCATION 1...277
  hypothetical: YES
ANSAMAKSISKSANRCAVKIFLSSSLLACLINDNLMELLVMVDALRRSSANSITAVLPYFGYARQDRKAAPRVPITAKMVANLMQEVGIERIITMDLHAGQIQGFFDVPVDNLYGSIVFRDYIRSKALKNPIIASPDVGGVTRARYFANQMGLDLIIVDKRREKANESEVMNIIGSAKERDVILVDDMIDTAGTICKAALALKEQGATSVMALGTHAVLSGNAIKRIKESALDEVVVTNSIPLVQKCDKITTLSVASLFAEVIRRIYHNESVQSLFT

SEQ ID NO: 6866 - protein, 321 aa, Helicobacter pylori
  misc_feature (B) LOCATION 1...321
  hypothetical: YES
VSAMKARGFKTKMRGFKIFSGSAHPAFGKEVSKHLGFPLSKAVIGKFSDGEINIQISESVRGKDIFIIQPTCVPVNDNLMELLVMVDALRRSSANSITAVLPYFGYARQDRKAAPRVPITAKMVANLMQEVGIERIITMDLHAGQIQGFFDVPVDNLYGSIVFRDYIRSKALKNPIIASPDVGGVTRARYFANQMGLDLIIVDKRREKANESEVMNIIGSAKERDVILVDDMIDTAGTICKAALALKEQGATSVMALGTHAVLSGNAIKRIKESALDEVVVTNSIPLVQKCDKITTLSVASLFAEVIRRIYHNESVQSLFT

SEQ ID NO: 6867 - protein, 58 aa, Helicobacter pylori
  misc_feature (B) LOCATION 1...58
  hypothetical: YES
MWLDHIAKEIRSLVENDIEVGIVIGGGNIIRGVSAALGGIIRRTSGDYMGMLATVIKR

SEQ ID NO: 6868 - protein, 59 aa, Helicobacter pylori
  misc_feature (B) LOCATION 1...59
  hypothetical: YES
KLDTLSYNDALIGDIEVMDDTAISLAKDNKLPIVVCNMFKKGNLLQVIKHQQGVFSMVK

SEQ ID NO: 6869 - protein, 198 aa, Helicobacter pylori
  misc_feature (B) LOCATION 1...198
  hypothetical: YES
VTIKSFINGLRRDHAGKDKKQAGFGEIFWGSVSWGQPVWIDIHVLDHIAKEIRSLVENDIEVGIVIGGGNIIRGVSAAQGGIIRRTSGDYMGMLATVINAVAMQEALEHIGLDTRVQSAIEIKEICESYIYRKAIRHLEKGRVVIFGAGTGNPFFTTDTAATLRAIEIGSDLIIKATKVDGIYDKDPNKFKDAKNWTL

SEQ ID NO: 6870 - protein, 240 aa, Helicobacter pylori
  misc_feature (B) LOCATION 1...240
  hypothetical: YES
MQAKIKNKRVLVKFSGEALAGDNQFGIDIHVLDHIAKEIRSLVENDIEVGIVIGGGNIIRGVSAAQGGIIRRTSGDYMGMLATVINAVAMQEALEHIGLDTRVQSAIEIKEICESYIYRKAIRHLEKGRVVIFGAGTGNPFFTTDTAATLRAIEIGSDLIIKATKVDGIYDKDPNKFKDAKKLDTLSYNDALIGDIEVMDDTAISLAKDNKLPIVVCNMFKKGNLLQVIKHQQGVFSMVK

SEQ ID NO: 6871 - protein, 240 aa, Helicobacter pylori; identical to SEQ ID NO: 6870
  misc_feature (B) LOCATION 1...240
  hypothetical: YES

SEQ ID NO: 6872 - protein, 109 aa, Helicobacter pylori
  misc_feature (B) LOCATION 1...109
  hypothetical: YES
MQDLPPCPKRNDAYTYHDGTQFVCSSCLYEWNGNEISNEELIVKDCHNNLLQNGDSVILIKDLKVKGSSLVLKKGTKIKNIKLVNSDHNVDCKVEGQSLSLKSEFLKKA

SEQ ID NO: 6873 - protein, 109 aa, Helicobacter pylori; identical to SEQ ID NO: 6872
  misc_feature (B) LOCATION 1...109
  hypothetical: YES

SEQ ID NO: 6874 - protein, 121 aa, Helicobacter pylori
  misc_feature (B) LOCATION 1...121
  hypothetical: YES
YHRTNTTIRIIIMQDLPPCPKRNDAYTYHDGTQFVCSSCLYEWNGNEISNEELIVKDCHNNLLQNGDSVILIKDLKVKGSSLVLKKGTKIKNIKLVNSDHNVDCKVEGQSLSLKSEFLKKA

SEQ ID NO: 6875 - protein, 104 aa, Helicobacter pylori
  misc_feature (B) LOCATION 1...104
  hypothetical: YES
LISSISVGVKKEECLFVEELAKQGLTPDYITIDIAHGHSNSVIEMIQRIKTRLPETFVIAGNVGTPEAVRELENAGADARKLASGLGRCVSLKSKQALARVAGN

SEQ ID NO: 6876 - protein, 103 aa, Helicobacter pylori
  misc_feature (B) LOCATION 1...103
  hypothetical: YES
ISSISVGVKKEECLFVEELAKQGLTPDYITIDIAHGHSNSVIEMIQRIKTRLPETFVIAGNVGTPEAVRELENAGADARKLASGLGRCVSLKSKQALARVAGN

SEQ ID NO: 6877 - protein, 128 aa, Helicobacter pylori
  misc_feature (B) LOCATION 1...128
  hypothetical: YES
SARKPIIADGGIRTHGDIAKSIRFGATMVMIGSLFAGHEESSGETKIENGIAYKEYFGSASEFQKGEKKNIEGKKIWIQHKGSLKNTLIEMHQDLQSSISYAGGRDLEAIRKVDYVIVKNSIFNGDTI

SEQ ID NO: 6878 - protein, 322 aa, Helicobacter pylori
  misc_feature (B) LOCATION 1...322
  hypothetical: YES
LITKNVQLIPNKCIVNSRSECDTTVILGKHAFKMPIVPANMQTIINESIAEFLAENGYFYIMHRFNGSARIPFVKKMKERQLISSISVGVKKEECLFVEELAKQGLTPDYITIDIAHGHSNSVIEMIQRIKTRLPETFVIAGNVGTPEAVRELENAGADATKVGIGPGKVCITKIKTGFGTGGWQLAALRWCAKAARKPIIADGGIRTHGDIAKSIRFGATMVMIGSLFAGHEESSGETKIENGIAYKEYFGSASEFQKGEKKNIEGKKIWIQHKGSLKNTLIEMHQDLQSSISYAGGRDLEAIRKVDYVIVKNSIFNGDTI

SEQ ID NO: 6879 - protein, 77 aa, Helicobacter pylori
  misc_feature (B) LOCATION 1...77
  hypothetical: YES
SDRHHEAYSTRVGNGPFPSEDTTPMGDHLRTKGVEFGTTTKRPRRCGWLDLVALKYACALNGCTQLAFNEIRRFRRD

SEQ ID NO: 6880 - protein, 95 aa, Helicobacter pylori
  misc_feature (B) LOCATION 1...95
  hypothetical: YES
QAFKPSNLLCFKDNILWQMSLWGSSGEDEGKGKIVDRIAKDYDFVVRYQGGHNAGHTIVHKGVKHSLHLMPSGVLYPKCKNIISSAVVASMAVGE

SEQ ID NO: 6881 - protein, 120 aa, Helicobacter pylori
  misc_feature (B) LOCATION 1...120
  hypothetical: YES
PLMKLDVLDGIDAIKVCVAYERKGERLEAFPSDLKDCTPIYQTFKGWEKSVGVRKLDDLEPNAREYIRFIEKEVGVKIGLISTSPERERHDFSMKKFASVLVQLKTLALEKIGESLKASV

SEQ ID NO: 6882 - protein, 179 aa, Helicobacter pylori
  misc_feature (B) LOCATION 1...179
  hypothetical: YES
LALSCQKDAFKEKSQNIGTTKKGIGPCYEDKMARSGIRMGDLLDDKILEEKLNAHFKAIEPFKKAYDLGENYEKDLMGYFKTYAPKICPFIKDTTSMLIEANQKGEKILLEGAQGTLLDIDLGTYPFVTSSNTTSASACVSTGLNPKAINEVIGITKPIPLVWVMGLSLAKTLHPWAII

SEQ ID NO: 6883 - protein, 178 aa, Helicobacter pylori
  misc_feature (B) LOCATION 1...178
  hypothetical: YES
ALSCQKDAFKEKSQNIGTTKKGIGPCYEDKMARSGIRMGDLLDDKILEEKLNAHFKAIEPFKKAYDLGENYEKDLMGYFKTYAPKICPFIKDTTSMLIEANQKGEKILLEGAQGTLLDIDLGTYPFVTSSNTTSASACVSTGLNPKAINEVIGITKPIPLVWVMGLSLAKTLHPWAII

SEQ ID NO: 6884 - protein, 411 aa, Helicobacter pylori
  misc_feature (B) LOCATION 1...411
  hypothetical: YES
MADVVVGIQWGDEGKGKIVDRIAKDYDFVVRYQGGHNAGHTIVHKGVKHSLHLMPSGVLYPKCKNIISSAVVVSVKDLCEEISAFEDLENRLFISDRAHVILPYHAKKDAFKEKSQNIGTTKKGIGPCYEDKMARSGIRMGDLLDDKILEEKLNAHFKAIEPFKKAYDLGENYEKDLMGYFKTYAPKICPFIKDTTSMLIEANQKGEKILLEGAQGTLLDIDLGTYPFVTSSNTTSASACVSTGLNPKAINEVIGITKAYSTRVGNGPFPSEDTTPMGDHLRTKGVEFGTTTKRPRRCGWLDLVALKYACALNGCTQLALMKLDVLDGIDAIKVCVAYERKGERLEAFPSDLKDCTPIYQTFKGWEKSVGVRKLDDLEPNAREYIRFIEKEVGVKIGLISTSPEREDTIFL

SEQ ID NO: 6885 - protein, 206 aa, Helicobacter pylori [sequence omitted]

SEQ ID NO: 6886 - protein, 211 aa, Helicobacter pylori
  misc_feature (B) LOCATION 1...211
  hypothetical: YES
RIKNLMNNDFNLLILSGPSGAGKSTLTKYLQEKIPKTHFSLSTTTRKPREGEVDGLHYNFVSEEEFKQGIEKGQFLEWAIVHNHYYGTSKIPVEKALKEGKIVIFDIDVQGHEILKKHYPNACSVFISTKNQEILKERLLLRGTDSKETIEKRLINAYKEMQCLESFDYLIINEDLEKSKEIILSIAKTLVHRLKAFNFEKICKAWKNESL

SEQ ID NO: 6887 - protein, 223 aa, Helicobacter pylori
  misc_feature (B) LOCATION 1...223
  hypothetical: YES
LGQNFVDNAFENTRLVRFMEVSRALQIPVLLDKVNSIATLKLIKAFNDLGAKLQAQTPLSHLILDESVYEDYEPRFKIAPPLRDKEGQNALKEALKNNEIAMLTSLHASKNSNAQLFEESAFGCESIEDAFSVAYTFLVQKKVISFQQLIKVMTINQAKFLKLNAGEVKENQLANLMIVDLNAQTRVSNQNSPFYGLELYGEVQRMILKGQTTFIKENACKKS

SEQ ID NO: 6888 - protein, 259 aa, Helicobacter pylori
  misc_feature (B) LOCATION 1...259
  hypothetical: YES
RFFRTHQPLRQILQLAPFNFFGKSFEALNSGALAYELGQNFVDNAFENTRLVRFMEVSRALQIPVLLDKVNSIATLKLIKAFNDLGAKLQAQTPLSHLILDESVYEDYEPRFKIAPPLRDKEGQNALKEALKNNEIAMLTSLHASKNSNAQLFEESAFGCESIEDAFSVAYTFLVQKKVISFQQLIKVMTINQAKFLKLNAGEVKENQLANLMIVDLNAQTRVSNQNSPFYGLELYGEVQRMILKGQTTFIKENACKKS

SEQ ID NO: 6889 - protein, 56 aa, Helicobacter pylori
  misc_feature (B) LOCATION 1...56
  hypothetical: YES
KYHGNQKQPTSRHRPLKNKGGEILIAPSDAFLELISHYAKSYNLPLLISLENLLKP

SEQ ID NO: 6890 - protein, 116 aa, Helicobacter pylori
  misc_feature (B) LOCATION 1...116
  hypothetical: YES
EGLMLLKNASFYDDEVLKRADIRLKDSLIIEIEENLSPTNNEEVVECEDLFVLPSFIDLSVTNLEGYENLKQKAFKGGVGLLNVFNGDQSGIKNIMAIKNNQLADIARLKIKGGKF

SEQ ID NO: 6891 - protein, 146 aa, Helicobacter pylori
  misc_feature (B) LOCATION 1...146
  hypothetical: YES
MLLKNASFYDDEVLKRADIRLKDSLIIEIEENLSPTNNEEVVECEDLFVLPSFIDLSVTNLEGYENLKQKAFKGGVGLLNVFNGDQSGIKNIMAIKNNQLADIATLKNKGGEILIAPSDAFLELISHYAKSYNLPLLISLENLLKP

SEQ ID NO: 6892 - protein, 253 aa, Helicobacter pylori
  misc_feature (B) LOCATION 1...253
  hypothetical: YES
WGDGGDVYFEVDNNTDTLASFRGTKHHKAKNGAPGGTRNCAGKKGEDKIIVVPPGTQVFVGDELWLDLVEPKERVLALKGGKGGLGNAHFKSATKQQPTYAQKGLEGVEKCVRLELKLIADIGLVGFPNAGKSTLISTISNAKPKIANYEFTTLVPNLGVVSVDEKSEFLMADIPGIIEGASEGKGLGISFLKHIERTKVLAFVLDASRLDLGIKEQYKRLRLELEKFSPTLANKPFGVLLNKCEFEKLYGVT

SEQ ID NO: 6893 - protein, 360 aa, Helicobacter pylori
  misc_feature (B) LOCATION 1...360
  hypothetical: YES
VFVDSVEIIIASGKGGPGMVSFRREKFVIKGGPDGGDGGDGGDVYFEVDNNTDTLASFRGTKHHKAKNGAPGGTRNCAGKKGEDKIIVVPPGTQVFVGDELWLDLVEPKERVLALKGGKGGLGNAHFKSATKQQPTYAQKGLEGVEKCVRLELKLIADIGLVGFPNAGKSTLISTISNAKPKIANYEFTTLVPNLGVVSVDEKSEFLMADIPGIIEGASEGKGLGISFLKHIERTKVLAFVLDASRLDLGIKEQYKRLRLELEKFSPTLANKPFGVLLNKCDVVENINEMTKDFCAFLNLEAQKLNAFDLEPYLGFLHPNLTSDFENNPNEQSALFVLPLSAVSALNTHALKFVLLKALQ

SEQ ID NO: 6894 - protein, 71 aa, Helicobacter pylori
  misc_feature (B) LOCATION 1...71
  hypothetical: YES
KNAVFHMCAKKQMKGLGHAILTGEALIGNEPFAVILADDLCISHEYPSVLKQMTSLYQKYHCSIVAIEEVY

SEQ ID NO: 6895 - protein, 127 aa, Helicobacter pylori
  misc_feature (B) LOCATION 1...127
  hypothetical: YES
LKGQTMIKKCLFPAAGYGTRFLLITNTILIEMLPIVDKLLIQYAVEEAMEAGCEVDGDRYRARNKRSLEDYFDTSYEIEHQIQGTNKENALKSIRNIIEKCCFSYVRQKANERLRACDFNRGSPDRQ

SEQ ID NO: 6896 - protein, 317 aa, Helicobacter pylori
  misc_feature (B) LOCATION 1...317
  hypothetical: YES
MIKKCLFPAAGYGTRFLPITKTIPKEMLPIVDKPLIQYAVEEAMEAGCEVMAIVTGRNKRSLEDYFDTSYEIEHQIQGTNKENALKSIRNIIEKCCFSYVRQKQMKGLGHAILTGEALIGNEPFAVILADDLCISHEYPSVLKQMTSLYQKYQCSIVAIEEVVLEEVSKYGVIRGEWLEERVYEIKDMVEKPSQEDAPSNLAVIGRYILTPDIFDILRETKPGKNNEIQITDALLTQAKRKRIIAYQFKGKRYDCGSVEGYIEASNAYYKNAYKSYQHGQFDLLRLHVFDPLCMPVACVIGGACLEAYSPPLKAKYS

SEQ ID NO: 6897 - protein, 102 aa, Helicobacter pylori
  misc_feature (B) LOCATION 1...102
  hypothetical: YES
MKESIKYLLESVGLVLLMSVNPGFGGQKFLDLVLEKCLKVKELIKRYNPSCLLEVDGGVNDKNIFELQQAGVDVVVSGSYIFESKDXKLAIEGLQNVRQPLA

SEQ ID NO: 6898 - protein, 132 aa, Helicobacter pylori
  misc_feature (B) LOCATION 1...132
  hypothetical: YES
MSENEKHPHRVLQLIKSSGITPGIVLNPHTHEESIKYLLESVGLVLLMSVNPGFGGQKFLDLVLEKCLKVKELIKRYNPSCLLEVDGGVNDKNIFELQQAGVDVVVSGSYIFESKDRKLAIEGLQNVRQPLA

SEQ ID NO: 6899 - protein, 139 aa, Helicobacter pylori
  misc_feature (B) LOCATION 1...139
  hypothetical: YES
TRKSSASMSENEKHPHRVLQLIKSSGITPGIVLNPHTHEESIKYLLESVGLVLLMSVNPGFGGQKFLDLVLEKCLKVKELIKRYNPSCLLEVDGGVNDKNIFELQQAGVDVVVSGSYIFESKDRKLAIEGLQNVRQPLA

SEQ ID NO: 6900 - protein, 71 aa, Helicobacter pylori
  misc_feature (B) LOCATION 1...71
  hypothetical: YES
AGQHMQILENIEELRHYLESVTHSLEISPKNPLLIDKFLEKAVELDVDAICDKKEVYMPVFYSILKKPESI

SEQ ID NO: 6901 - protein, 77 aa, Helicobacter pylori
  misc_feature (B) LOCATION 1...77
  hypothetical: YES
ISEGRPNIMDLMMNGEISMAINTSDHKSQDDAKLIRASVLKNHVSYFTTLSAIEVLLLALEESSQEDELLALQDYLK

SEQ ID NO: 6902 - protein, 220 aa, Helicobacter pylori
  misc_feature (B) LOCATION 1...220
  hypothetical: YES
PSTLSPEILDEIERVSAKIALHLGVVGLLNIQFAVYQNSLYLIEVNPRASRTVPFLSKALGVPLAKVATRVMVLEDLKEALKFYDKKNIVEYSKGVYKPKMPHFVALKEAVFPFNKLYGSDLILGPEMKSTGEVMGIARSLGLAFFKAQTACFNPIKNKGLIFVSIKDKDKEEACVLMKRLVELGFELFTTEGTHKALEKAGVKSLKVLKSLKAAPISWI

SEQ ID NO: 6903 - protein, 219 aa, Helicobacter pylori
  misc_feature (B) LOCATION 1...219
  hypothetical: YES
STLSPEILDEIERVSAKIALHLGVVGLLNIQFAVYQNSLYLIEVNPRASRTVPFLSKALGVPLAKVATRVMVLEDLKEALKFYDKKNIVEYSKGVYKPKMPHFVALKEAVFPFNKLYGSDLILGPEMKSTGEVMGIARSLGLAFFKAQTACFNPIKNKGLIFVSIKDKDKEEACVLMKRLVELGFELFTTEGTHKALEKAGVKSLKVLKSLKAAPISWI

SEQ ID NO: 6904 - protein, 294 aa, Helicobacter pylori
  misc_feature (B) LOCATION 1...294
  hypothetical: YES
GSGPIVIGQACEFDYSGTQSCKTLKSLGYRVILINSNPATVMTDPEFSHQTYIQPITPENIAAIIKKEKIDAILPTMGGQTALNAVMQMHQRGMLEGVELLGAKIEAIKKGEDRQAFKEAMLKIGMDLPKGRYAYSELVALEAISEIGFPAIIRASFTLAGGGSGVAYNIEEFHELAKNALDASPINEILIEESLLGWKEYEMEVIRDGKDNCIIVCCIENIDPMGVHTGDSITIAPSLTLTDKEYQRMRDASFAILREIGVDTGGSNVQFAIHPETLRMVVIEMNPRVSRSSL

SEQ ID NO: 6905 - protein, 293 aa, Helicobacter pylori
  misc_feature (B) LOCATION 1...293
  hypothetical: YES
SGPIVIGQACEFDYSGTQSCKTLKSLGYRVILINSNPATVMTDPEFSHQTYIQPITPENIAAIIKKEKIDAILPTMGGQTALNAVMQMHQRGMLEGVELLGAKIEAIKKGEDRQAFKEAMLKIGMDLPKGRYAYSELVALEAISEIGFPAIIRASFTLAGGGSGVAYNIEEFHELAKNALDASPINEILIEESLLGWKEYEMEVIRDGKDNCIIVCCIENIDPMGVHTGDSITIAPSLTLTDKEYQRMRDASFAILREIGVDTGGSNVQFAIHPETLRMVVIEMNPRVSRSSL

SEQ ID NO: 6906 - protein, 307 aa, Helicobacter pylori
  misc_feature (B) LOCATION 1...307
  hypothetical: YES
MPKRTDISNILLIGSGPIVIGQACEFDYSGTQSCKTLKSLGYRVILINSNPATVMTDPEFSHQTYIQPITPENIAAIIKKEKIDAILPTMGGQTALNAVMQMHQRGMLEGVELLGAKIEAIKKGEDRQAFKEAMLKIGMDLPKGRYAYSELEALEAISEIGFPAIIRASFTLAGGGSGVAYNIEEFQELAKNALDASPINEILIEESLLGWKEYEMEVIRDGKDNCIIVCCIENIDPMGVHTGDSITIAPSLTLTDKEYQRMRDASFAILREIGVDTGGSNVQFAIHPETLRMVVIEMNPRVSRSSL

SEQ ID NO: 6907 - protein, 375 aa, Helicobacter pylori
  misc_feature (B) LOCATION 1...375
  hypothetical: YES
LALASKATGFPIAKVATMLAVGFSLDEIKNDITNTPASFEPSLDYIVVKIPRFAFEKFAGVSSTLGTSMKSIGEVMAIGGNFLEALQKALCSLENNWLGFESLSKDLEAIKKEIRRPNPKRLLYIADAFRLGVSVDEVFELCQIDRWFLSQIQKLVKAEEGINSSVLTDAKKLRGLKNLGFSDARIATKIKENENLEVSPFEVELARSNLQIAPHFEEVDTCAAEFLSLTPYLYSTYAPNPLPPIGNKQEKQEKKILIIGSGPNRIGQGIEFDYCCVHASFALKDLNIKSVMLNCNPETVSTDYDTSDTLYFEPIHFECVKSIIQRERVDGIIVHFGGQTPLKLAKDLAKMQAPIIGTPFKVIDIAEDREKFPSF

SEQ ID NO: 6908 - protein, 766 aa, Helicobacter pylori
  misc_feature (B) LOCATION 1...766
  hypothetical: YES
VATMLAVGFSLDEIKNDITNTPASFEPSLDYIVVKIPRFAFEKFAGVSSTLGTSMKSIGEVMAIGGNFLEALQKALCSLENNWLGFESLSKDLEAIKKEIRRPNPKRLLYIADAFRLGVSVDEVFELCQIDRWFLSQIQKLVKAEEGINSSVLTDAKKLRGLKNLGFSDARIATKIKENENLEVSPFEVELARSNLQIAPHFEEVDTCAAEFLSLTPYLYSTYAPNPLPPIGNKQEKQEKKILIIGSGPNRIGQGIEFDYCCVHASFALKDLNIKSVMLNCNPETVSTDYDTSDTLYFEPIHFECVKSIIQRERVDGIIVHFGGQTPLKLAKDLAKMQAPIIGTPFKVIDIAEDREKFSLFLKELDIKQPENGMAKSVDEAYSIANAIGFPIIVRPSYVLGGQHMQILENIEELRHYLESVTHSLEISPKNPLLIDKFLEKAVELDVDAICDKKEVYIAGILQHIEEAGIHSGDSACFIPSTLSPEILDEIERVSAKIALHLGVVGLLNIQFAVYQNSLYLIEVNPRASRTVPFLSKALGVPLAKVATRVMVLEDLKEALKFYDKKNIVEYSKGVYKPKMPHFVALKEAVFPFNKLYGSDLILGPEMKSTGEVMGIARSLGLAFFKAQTACFNPIKNKGLIFVSIKDKDKEEACVLMKRLVELGFELCTTEGTHKALEKAGVKSLKVLKISEGRPNIMDLMMNGEISMAINTSDHKSQDDAKLIRASVLKNHVSYFTTLSAIEVLLLALEESSQEDELLALQDYLK

SEQ ID NO: 6909 - protein, 1085 aa, Helicobacter pylori
  misc_feature (B) LOCATION 1...1085
  hypothetical: YES
MPKRTDISNILLIGSGPIVIGQACEFDYSGTQSCKTLKSLGYRVILINSNPATVMTDPEFSHQTYIQPITPENIAAIIKKEKIDAILPTMGGQTALNAVMQMHQRGMLEGVELLGAKIEAIKKGEDRQAFKEAMLKIGMDLPKGRYAYSELEALEAISEIGFPAIIRASFTLAGGGSGVAYNIEEFQELAKNALDASPINEILIEESLLGWKEYEMEVIRDGKDNCIIVCCIENIDPMGVHTGDSITIAPSLTLTDKEYQRMRDASFAILREIGVDTGGSNVQFAIHPETLRMVVIEMNPRVSRSSALASKATGFPIAKVATMLAVGFSLDEIKNDITNTPASFEPSLDYIVVKIPRFAFEKFAGVSSTLGTSMKSIGEVMAIGGNFLEALQKALCSLENNWLGFESLSKDLEAIKKEIRRPNPKRLLYIADAFRLGVSVDEVFELCQIDRWFLSQIQKLVKAEEGINSSVLTDAKKLRGLKNLGFSDARIATKIKENENLEVSPFEVELARSNLQIAPHFEEVDTCAAEFLSLTPYLYSTYAPNPLPPIGNKQEKQEKKILIIGSGPNRIGQGIEFDYCCVHASFALKDLNIKSVMLNCNPETVSTDYDTSDTLYFEPIHFECVKSIIQRERVDGIIVHFGGQTPLKLAKDLAKMQAPIIGTPFKVIDIAEDREKFSLFLKELDIKQPENGMAKSVDEAYSIANAIGFPIIVRPSYVLGGQHMQILENIEELRHYLESVTHSLEISPKNPLLIDKFLEKAVELDVDAICDKKEVYIAGILQHIEEAGIHSGDSACFIPSTLSPEILDEIERVSAKIALHLGVVGLLNIQFAVYQNSLYLIEVNPRASRTVPFLSKALGVPLAKVATRVMVLEDLKEALKFYDKKNIVEYSKGVYKPKMPHFVALKEAVFPFNKLYGSDLILGPEMKSTGEVMGIARSLGLAFFKAQTACFNPIKNKGLIFVSIKDKDKEEACVLMKRLVELGFELCTTEGTHKALEKAGVKSLKVLKISEGRPNIMDLMMNGEISMAINTSDHKSQDDAKLIRASVLKNHVSYFTTLSAIEVLLLALEESSQEDELLALQDYLK

SEQ ID NO: 6910 - protein, 336 aa, Helicobacter pylori
  misc_feature (B) LOCATION 1...336
  hypothetical: YES
MPTDNDLKTSIVELLRDLDALLVAHFYQKDEIVELAHYTGDSLELAKIASQSDKNLIVFCGVHFMGESVKALAFNKQVIMPKLSCCSMARMIDSHYYDRSVHLLKEYGVKEFYPITYINSNAEVKAKVAKDDGVVCTSRNASKIFNHALKQNKKIFFLPDKCLGENLALENGLKSAILGINSPEEIKNADVVCYNGFCSVHQLFKLEDIEFYRQKYPDILIAVHPECEPSVVSNADFSGSTSQIIEFVEKLSPHQKVAIGTESHLVNRLKAKRNHQNTFILSSTLAFCPTMNETTLKDLFEVLKAYKNHRAYNAIELKDEVARLAKLALTKMMELS

SEQ ID NO: 6911 - protein, 339 aa, Helicobacter pylori
  misc_feature (B) LOCATION 1...339
  hypothetical: YES
GNFMPTDNDLKTSIVELLRDLDALLVAHFYQKDEIVELAHYTGDSLELAKIASQSDKNLIVFCGVHFMGESVKALAFNKQVIMPKLSCCSMARMIDSHYYDRSVHLLKEYGVKEFYPITYINSNAEVKAKVAKDDGVVCTSRNASKIFNHALKQNKKIFFLPDKCLGENLALENGLKSAILGINSPEEIKNADVVCYNGFCSVHQLFKLEDIEFYRQKYPDILIAVHPECEPSVVSNADFSGSTSQIIEFVEKLSPHQKVAIGTESHLVNRLKAKRNHQNTFILSSTLAFCPTMNETTLKDLFEVLKAYKNHRAYNAIELKDEVARLAKLALTKMMELS

SEQ ID NO: 6912 - protein, 91 aa, Helicobacter pylori
  misc_feature (B) LOCATION 1...91
  hypothetical: YES
CVRTSSLAGKSAMECAKVLEEKGAQIVAFGALTNRGMCKRAHSHLKAQEGACLPIHLPLFALKNFVFDMHKPSSCPLCATSVAIKPGNRGN

SEQ ID NO: 6913 - protein, 103 aa, Helicobacter pylori
  misc_feature (B) LOCATION 1...103
  hypothetical: YES
FHSNYYLQPAKVLEDPKLAEQLALELAKQIQEAHLNIECVCSPAIGGILAGYELARVLGVRFIFTERVDNTMTLRRGFEVKKNEKILVCEDIITSGKIRYGMR

SEQ ID NO: 6914 - protein, 102 aa, Helicobacter pylori
  misc_feature (B) LOCATION 1...102
  hypothetical: YES
HSNYYLQPAKVLEDPKLAEQLALELAKQIQEAHLNIECVCSPAIGGILAGYELARVLGVRFIFTERVDNTMTLRRGFEVKKNEKILVCEDIITSGKIRYGMR

SEQ ID NO: 6915 - protein, 201 aa, Helicobacter pylori
  misc_feature (B) LOCATION 1...201
  hypothetical: YES
MDIKACYQNAQALLEGHFLLSSGFHSNYYLQSAKVLEDPKLAEQLALELAKQIQEAHLNIECVCSPAIGGILAGYELARALGVRFIFTERVDNTMTLRRGFEVKKNEKILVCEDIITTGKSAMECAKVLEEKGAQIVAFGALANRGICKRAHSHLKAQEGACLPSHLPLFALEDFVFDMHKPSSCPLCATSVAIKPGSRGN

SEQ ID NO: 6916 - protein, 62 aa, Helicobacter pylori
  misc_feature (B) LOCATION 1...62
  hypothetical: YES
GSFRGADDNERVFHNRMRLFLDPLVEIQNFYKAKHLHKIINGERSIEEIVNEMQKYILSFAN

SEQ ID NO: 6917 - protein, 94 aa, Helicobacter pylori
  misc_feature (B) LOCATION 1...94
  hypothetical: YES
IKVRSVKKTERGLLIEKFTSQGELVPLEIVVETILSEIKSSSKGIILIDGYPRSVEQMQALDKELNAPNEVILKSVIEVEVSENTAKERVLGQF

SEQ ID NO: 6918 - protein, 93 aa, Helicobacter pylori
  misc_feature (B) LOCATION 1...93
  hypothetical: YES
KVRSVKKTERGLLIEKFTSQGELVPLEIVVETILSEIKSSSKGIILIDGYPRSVEQMQALDKELNAPNEVILKSVIEVEVSENTAKERVLGQF

SEQ ID NO: 6919 - protein, 132 aa, Helicobacter pylori
  misc_feature (B) LOCATION 1...132
  hypothetical: YES
MKQLFLIIGAPGSGKTTDAELIAKNNSETIAHFSTGDLLRAESAKKTERGLLIEKFTSQGELVPLEIVVETILSAIKSSSKGIILIDGYPRSVEQMQALDKELNAPNEVILKSVIEVEVSENTAKERVLGQF

SEQ ID NO: 6920 - protein, 191 aa, Helicobacter pylori [sequence omitted]

SEQ ID NO: 6921 - protein, 191 aa, Helicobacter pylori
  misc_feature (B) LOCATION 1...191
  hypothetical: YES
MKQLFLIIGAPGSGKTTDAELIAKNNSETIAHFSTGDLLRAESAKKTERGLLIEKFTSQGELVPLEIVVETILSAIKSSSKGIILIDGYPRSVEQMQALDKELNAPNEVILKSVIEVEVSENTAKERVLGRSRGADDNERVFHNRMRVFLDPLVEIQNFYKAKHLHKIINGERSIEEIVNEMQKYILSFAN

SEQ ID NO: 6922 - protein, 146 aa, Helicobacter pylori
  misc_feature (B) LOCATION 1...146
  hypothetical: YES
MTLDDLLGGSLDPHCFCKPLIKTKKDQERLLSLALKAHPKISFGKDSAPHFISKKHSANIPAGIFSAPILLPALCELFEKHNALENLQAFISDNAKKIYALDNLPSKKAHLSKKPFIVPTHTLCLNEKIAILRGGETLSWNLQEIA

SEQ ID NO: 6923 - protein, 339 aa, Helicobacter pylori
  misc_feature (B) LOCATION 1...339
  hypothetical: YES
MEITLFDPIDAHLHVRENALLKAVLEYSSEPFSAAVIMPNLSKPLIDTPITLEYEEEILKNSSNFKPLMSLYFNDGLTLEELQRAKNKGIKFLKLYPKGMTTNAQNGTSDLLGEKTLEVLENAQKLGFILCVHAEQAGFCLDKEFLCHSVLETFALSFPKLKIIIEHLSDWRSIALIEKHDNLYATLTLHHISMTLDDLLGGSLDPHCFCKPLIKTKKDQERLLSLALKAHPKISFGSDSAPHFISKKHSANIPAGIFSAPILLPALCELFEKHNALENLQAFISDNAKKIYALDNLPSKKAHLSKKPFIVPTHTLCLNEKIAILRGGETLSWNLQEIA

SEQ ID NO: 6924 - protein, 371 aa, Helicobacter pylori
  misc_feature (B) LOCATION 1...371
  hypothetical: YES
RPFRSLIRITHAPKLKPSFALECVITWEAINSMEITLFDPIDAHLHVRENALLKAVLEYSSEPFSAAVIMPNLSKPLIDTPITLEYEEEILKNSSNFKPLMSLYFNDGLTLEELQRAKNKGIKFLKLYPKGMTTNAQNGTSDLLGEKTLEVLENAQKLGFILCVHAEQAGFCLDKEFLCHSVLETFALSFPKLKIIIEHLSDWRSIALIEKHDNLYATLTLHHISMTLDDLLGGSLDPHCFCKPLIKTKKDQERLLSLALKAHPKISFGSDSAPHFISKKHSANIPAGIFSAPILLPALCELFEKHNALENLQAFISDNAKKIYALDNLPSKKAHLSKKPFIVPTHTLCLNEKIAILRGGETLSWNLQEIA

SEQ ID NO: 6925 - protein, 115 aa, Helicobacter pylori
  misc_feature (B) LOCATION 1...115
  hypothetical: YES
LIALRVTAWKVXAMKRLHLSVKDAENFDAILRERPFFKDLIEFMVSGPVVVMVLEGKDAVAKNRELMGATDPKLAQKGTIRADFAESIDANAVHGSDSLENAHNEIAFFFAAREF

SEQ ID NO: 6926 - protein, 137 aa, Helicobacter pylori
  misc_feature (B) LOCATION 1...137
  hypothetical: YES
LKQRTLSIIKPDALKKKVVGKIIDRFESNGLEVVAMKRLHLSVKDAENFYAIHRERPFFKDLIEFMVSGPVVVMVLEGKDAVAKNRELMGATDPKLAQKGTIRADFAESIDANAVHGSDSLENAHNEIAFFFAAREF

SEQ ID NO: 6927 - protein, 145 aa, Helicobacter pylori
  misc_feature (B) LOCATION 1...145
  hypothetical: YES
STIHKEFKLKQRTLSIIKPDALKKKVVGKTIDRFESNGLEVVAMKRLHLSVKDAENFYAILRERPFFKDLIEFMVSGPVVVMVLEGKDAVAKNRELMGATDPKLAQKGTIRADFAESIDANAVHGSDSLENAHNEIAFFFAAREF

SEQ ID NO: 6928 - protein, 293 aa, Helicobacter pylori
  misc_feature (B) LOCATION 1...293
  hypothetical: YES
MLEFILKIQAKDSKGLVSAISATIANKGYNIVKNDEFVDPLKQRFFMRLKIQKEMKPLNTEIKEQEERSLKTALFKALENFSELLIEVILTHKKNIILLATKESHCLGDLLLRVYGGELNAQILGVISNHEILRPLVEKFDIPYFYAPCVDQILHEKEVLATIKDLELKHKVSADLLVLAKYMRILSHDFTKRYENQILNIHHSFLPAFIGANPYQQAFERGVKVIGATAHFVNESLDAGPIILQDTLPINHNYSVEKMRLAGKDIEKLVLARALKLVLEDRVFVHENKTVVF

SEQ ID NO: 6929 - protein, 295 aa, Helicobacter pylori
  misc_feature (B) LOCATION 1...295
  hypothetical: YES
MKMLEFILKIQAKDSKGLVSAISATIANKGYNIVKNDEFVDPLKQRFFMRLKIQKEMKPLNTEIKEQEERSLKTALFKALENFSELLIEVILTHKKNIILLATKESHCLGDLLLRVYGGELNAQILGVISNHEILRPLVEKFDIPYFYAPCVDQILHEKEVLATIKDLELKHKVSADLLVLAKYMRILSHDFTKRYENQILNIHHSFLPAFIGANPYQQAFERGVKVIGATAHFVNESLDAGPIILQDTLPINHNYSVEKMRLAGKDIEKLVLARALKLVLEDRVFVHENKTVVF

SEQ ID NO: 6930 - protein, 295 aa, Helicobacter pylori
  misc_feature (B) LOCATION 1...295
  hypothetical: YES
KSHAIGYKHHHASVWLSIIDEMKMLEFILKIQAKDSKGLVSAISATIANKGYNIVKNDEFVDPLKQRFFMRLKIQKEMKPLNTEIKEQEERSLKTALFKALENFSELLIEVILTHKKNIILLATKESHCLGDLLLRVYGGELNAQILGVISNHEILRPLVEKFDIPYFYAPCVDQILHEKEVLATIKDLELKHKVSADLLVLAKYMRILSHDFTKRYENQILNIHHSFLPAFIGANPYQQAFERGVKVIGATAHFVNESLDAGPIILQDTLPINHNYSVEKMRLAGKDIEKLVLG

SEQ ID NO: 6931 - protein, 182 aa, Helicobacter pylori
  misc_feature (B) LOCATION 1...182
  hypothetical: YES
KMYVVLEGVDGAGKSTQVGLLKDRFKNALFTKEPGGTRMGESLRRIALNENISELARAFLFLSDRAEHIESVIKPALKEKKLIISDRSLISGMAYSQFSSLGLNLLATQSVLPEKIILLLINKENLKQRLSLKSLDKIENQGIEKLLTIQQKLKTHAYALQEKFGCEVLELDAQKSAKNLHE

SEQ ID NO: 6932 - protein, 191 aa, Helicobacter pylori
  misc_feature (B) LOCATION 1...191
  hypothetical: YES
MYVVLEGVDGAGKSTQVGLLKDRFKNALFTKEPGGTRMGESLRRIALNENISELARAFLFLSDRAEHIESVIKPALKEKKLIISDRSLISGMAYSQFSSLGLNLLATQSVLPEKIILLLINKENLKQRLSLKSLDKIENQGIEKLLTIQQKLKTHAYALQEKFGCEVLELDAQKSAKNLHEKIATFIECVV

SEQ ID NO: 6933 - protein, 205 aa, Helicobacter pylori
  misc_feature (B) LOCATION 1...205
  hypothetical: YES
SMRVFALQLESFEETLMQSLFNSIPKQSVVVLPEYVINPLFHHNMGLDVNEINAQSARAIGFLSPKCEEIDLIVSAPVLLEEHSKIYKKIALISKENIQYYTQQRLIPYPHWDEESFFDNEKSAFKELIVFERDGLRIAPLFGFEAHFDETWVQAKNQGVDVVLLSSAATFESNERWRLLCQMRAFCALAWWLGLIGSERIARSL

SEQ ID NO: 6934 - protein, 265 aa, Helicobacter pylori
  misc_feature (B) LOCATION 1...265
  hypothetical: YES
MRVFALQLESFEETLMQSLFNSIPKQSVVVLPEYVINPFFHHNMGLDVNEINAQSARAIGFLSHKCEELDLIVSAPVLLEEHSKIYKKIALISKENIQYYTQQRLIPYPHWDEESFFDNEKSAFKELLVFERDGLRIAPLFGFEAHFDEIWVQAKNQGVDVVLLSSVATFESNERWRLLCQMRAFCASCVVVRANRIGAYRQILVEGDQKNEFLWKFYGDSFVALPNGAIEDSLEGKMGALSAQMDKNDIDEWAKLWHFRTIKEG

SEQ ID NO: 6935 - protein, 306 aa, Helicobacter pylori
  misc_feature (B) LOCATION 1...306
  hypothetical: YES
MSSVQILSNFNYPISKVINEGLRNSLDTHIAVAFLKYSGVEIIQDVLINFLEKGAEFEIIVGLDFKTTDSKSIRFFLDLNKTYKKLKFYCYGDKENNKTDIVFHPKIYMFDNGKEKTSIIGSANLTKGGLENNFEVNTIFTEKEPLYYSQLNAIYNSIKYADSLFTPNEEYLESYDEVFSAIIKNEQKVSKDKSIQEKIKKIEKQEKLLPGTIPSIKAMIVEFIFACEKKGVKQVALQDIYQALEERIKKEEWGYKYKSDTFKNSIRGELNHHQKDSHSKHCFGLFERLQKGFYALTPKGRSYKGR

SEQ ID NO: 6936 - protein, 314 aa, Helicobacter pylori
  misc_feature (B) LOCATION 1...314
  hypothetical: YES
PKKLLRFLMSSVQILSNFNYPISKVINEGLRNSLDTHIAVAFLKYSGVEIIQDVLINFLEKGAEFEIIVGLDFKTTDSKSIRFFLDLNKTYKKLKFYCYGDKENNKTDIVFHPKIYMFDNGKEKTSIIGSANLTKGGLENNFEVNTIFTEKEPLYYSQLNAIYNSIKYADSLFTPNEEYLESYDEVFSAIIKNEQKVSKDKSIQEKIKKIEKQEKLLPGTIPSIKAMIVEFIFACEKKGVKQVALQDIYQALEERIKKEEWGYKYKSDTFKNSIRGELNHHQKDSHSKHCFGLFERLQKGFYALTPKGRSYKGR

SEQ ID NO: 6937 - protein, 60 aa, Helicobacter pylori
  misc_feature (B) LOCATION 1...60
  hypothetical: YES
LRVGAAIGVGQLDRAEMLVKAGVDALVLDSAHGHSANILHTLEEIKKSLVVDVIVGNVDT

SEQ ID NO: 6938 - protein, 67 aa, Helicobacter pylori
  misc_feature (B) LOCATION 1...67
  hypothetical: YES
GNKDDFGRLRVGAAIGVGQLDRAEMLVKAGVDALVLDSAHGHSANILHTLEEIKKSLVVDVIVGNVD

SEQ ID NO: 6939 - protein, 75 aa, Helicobacter pylori
  misc_feature (B) LOCATION 1...75
  hypothetical: YES
WWPRKSSVLPKDVSLKSRLTKNIGLNIPFISAAMDTVTEHKTAIAMARLGGIGIGIKTWIFTRSQRITKVKARAA

SEQ ID NO: 6940 - protein, 96 aa, Helicobacter pylori
  misc_feature (B) LOCATION 1...96
  hypothetical: YES
VPVVDDKGLLIGILTNRDVRFETDLSKKVGDVMTKMPLVTAHVGISLDEASDLMHKHKIEKLPIVDKDNVFKGLITIKDIQKRIEYPEAIKMILGG

SEQ ID NO: 6941 - protein, 101 aa, Helicobacter pylori
  misc_feature (B) LOCATION 1...101
  hypothetical: YES
MGSIGAMTKGSSDRYFQEGVASEKLVPEGIEGRVPYRGKVSDMIFQLVGGVRSSMGYQGAKNILELYQNAEFVEITSAGLKKSHVHGVDITKEAPNIMGEF

SEQ ID NO: 6942 - protein, 111 aa, Helicobacter pylori
  misc_feature (B) LOCATION 1...111
  hypothetical: YES
SYFYPCAQDVADAKVITDNYKISGVPVVDDKGLLIGILTNRDVRFETDLSKKVGDVMTKMPLVTAHVGISLDEASDLMHKHKIEKLPIVDKDNVFKGLITIKDIQKRIEYP

SEQ ID NO: 6943 - protein, 114 aa, Helicobacter pylori
  misc_feature (B) LOCATION 1...114
  hypothetical: YES
AAPLPFVKSRFLLKGMGSLGAITKGSSDRYFQEGVASEKLVPEGIEGRVPYRGKVSDMIFQLVGGSRCFMWYQGAKNILELYQNAEFVEITSAGLKESHVHGVDIIKEAPNFYG

SEQ ID NO: 6944 - protein, 481 aa, Helicobacter pylori
  misc_feature (B) LOCATION 1...481
  hypothetical: YES
MRILQRALTFEDVLMVPRKSSVLPKDVSLKSRLTKNIGLNIPFISAAMDTVTEHKTAIAMARLGGIGIVHKNMDIQTQVKEITKVKKSESGVINDPIFIHAHRTLADAKVITDNYKISGVPVVDDKGLLIGILTNRDVRFETDLSKKVGDVMTKMPLVTAHVGISLDEASDLMHKHKIEKLPIVDKDNVLKGLITIKDIQKRIEYPEANKDDFGRLRVGAAIGVGQLDRAEMLVKAGVDALVLDSAHGHSANILHTLEEIKKSLVVDVIVGNVVTKEATSDLISAGADAVKVGIGPGSICTTRIVAGVGMPQVSAIDNCVEVASKFDIPVIADGGIRYSGDVAKALALGASSVMIGSLLAGTEESPGDFMIYQGRQYKSYRGMGSIGAMTKGSSDRYFQEGVASEKLVPEGIEGRVPYRGKVSDMIFQLVGGVRSSMGYQGAKNILELYQNAEFVEITSAGLKESHVHGVDITKEAPNYYG

SEQ ID NO: 6945 - protein, 276 aa, Helicobacter pylori
  misc_feature (B) LOCATION 1...276
  hypothetical: YES
MKTSNTKTPKPVLIAGPCVIESLENLRSIAIKLQPLANNERLDFYFKASFDKANRTSLESYRGPGLEKGLEMLQTIKDEFGYKILTDVHESYQASVAAKVADILQIPAFLCRQTDLIVEVSQTNAIVNIKKGQFMNPKDMQYSVLKALKTRDSSIQSPTYETALKNGVWLCERGSSFGYGNLVVDMRSLKIMREFAPVIFDATHSVQMPGGANGKSSGDSSFPPILPRAAAAVGIDGLFAETHIDPKNALSDGANMLKPDELEHLVTDMLKIQNLF

SEQ ID NO: 6946 - protein, 277 aa, Helicobacter pylori
  misc_feature (B) LOCATION 1...277
  hypothetical: YES
VMKTSNTKTPKPVLIAGPCVIESLENLRSIAIKLQPLANNERLDFYFKANFDNANRTSLESYKEPGLEKGLEMLQTIKDEFGYKILTDVHESYQASVAAKVADILQIPAFLCRQTDLIVEVSQTNAIVNIKKGQFMNPKDMQYSVLKALKTRDSSIQSPTYETALKNGVWLCERGSSFGYGNLVVDMRSLKIMREFAPVIFDATHSVQMPGGANGKSSGDSSFPPILPRAAAAVGIDGLFAETHIDPKNALSDGANMLKPDELEHLVTNMLKIQNLF

SEQ ID NO: 6947 - protein, 203 aa, Helicobacter pylori
  misc_feature (B) LOCATION 1...203
  hypothetical: YES
TPVVVLEESVRKRLPETAIKAAKYIGYVGAGTFEFLLDSNMKDFYFMEMNTRLQVEHTISEMVSGLNLIEWMIKIAQGEELPKQESFSLKGHAIECRITAEDPKKFYPSPGKITEWIAPGGVNVRLDSHAHANYVVPTNYDSMIGKLIVWGENRERAIAKMKRALKEFKVEGIKTTIPFHIEMLENADFRQAKIHTKYLEENF

SEQ ID NO: 6948 - protein, 202 aa, Helicobacter pylori
  misc_feature (B) LOCATION 1...202
  hypothetical: YES
PVVVLEESVRKRLPETAIKAAKYIGYVGAGTFEFLLDSNMKDFYFMEMNTRLQVEHTISEMVSGLNLIEWMIKIAQGEELPKQESFSLKGHAIECRITAEDPKKFYPSPGKITEWIAPGGVNVRLDSHAHANYVVPTNYDSMIGKLIVWGENRERAIAKMKRALKEFKVEGIKTTIPFHIEMLENADFRQAKIHTKYLEENF

SEQ ID NO: 6949 - protein, 360 aa, Helicobacter pylori
  misc_feature (B) LOCATION 1...360
  hypothetical: YES
LSENQNFVEICSHHSLEFIGPSAKVMALMSDKAKAKIVMKEAGMPVIEGSDGLLKSYQEAEEIADKIGYPVIIKAAAGGGGRGMRVVGDKSKLKNLYLAAETEALSAFGDGSVYLEKFINKPKHIEVQILADKHGNVIHVGERDCSVQRRQQKLIEETPAVVLEESVRKRLLETAIKAAKYIGYVGAGTFEFLLDSNMKDFYFMEMNTRLQVEHTISEMVSGLNLIEWMIKIAQGEELPKQESFSLKGHAIECRITAEDPKKFYPSPGKITEWIAPGGVNVRLDSHAHANYVVPTNYDSMIGKLIVWGENRERAIAKMKRALKEFKVEGIKTTIPFHIEMLENADFRQAKIHTKYLEENF

SEQ ID NO: 6950 - protein, 421 aa, Helicobacter pylori
  misc_feature (B) LOCATION 1...421
  hypothetical: YES
MGKESIAIYSIADKDAHYLNTANAKVCIGGAKSSESYLNIPAIISAAELFEADAIFPGYGFLSENQNFVEICSHHSLEFIGPSAKVMALMSDKAKAKIVMKEAGMPVIEGSDGLLKSYQEAEEIADKIGYPVIIKAAAGGGGRGMRVVGDKSKLKNLYLAAETEALSAFGDGSVYLEKFINKPKHIEVQILADKHGNVIHVGERDCSVQRRQQKLIEETPAVVLEESVRKRLLETAIKAAKYIGYVGAGTFEFLLDSNMKDFYFMEMNTRLQVEHTISEMVSGLNLIEWMIKIAQGEELPKQESFSLKGHAIECRITAEDPKKFYPSPGKITEWIAPGGVNVRLDSHAHANYVVPTNYDSMIGKLIVWGENRERAIAKMKRALKEFKVEGIKTTIPFHIEMLENADFRQAKIHTKYLEENF

SEQ ID NO: 6951 - protein, 172 aa, Helicobacter pylori
  misc_feature (B) LOCATION 1...172
  hypothetical: YES
RIIMQYALLFPGQGSQCIGMGKSFYESHTLAKELFERASNVLKVDMKKTLFEENELLKESAYTQPAIYLVSYIAYQLLNKQANGGLKPVFALGHSLGEVSAVSLSGALDFEKALKLTHQRGKMMQEACANKDASMMVVLGVFEESSLSLCQRTKNFLLREFQWRHASGFSRG

SEQ ID NO: 6952 - protein, 309 aa, Helicobacter pylori
  misc_feature (B) LOCATION 1...309
  hypothetical: YES
MQYALLFPGQGSQCIGMGKSFYESHTLAKELFERASNVLKVDMKKTLFEENELLKESAYTQPAIYLVSYIAYQLLNKQANGGLKPVFALGHSLGEVSAVSLSGALDFEKALKLTHQRGKMMQEACANKDASMMVVLGVSEESLLSLCQRTKNVWCANFNGGMQVVLAGVKDDLKALEPTLKEMGAKRVVFLEMSVASHCPFLEPMIFKFQELLEKSLKDKFHFEIISNATNEAYHNKSKAVELLSLQLTQPVRYQDCVKSNNDRVDVFFELGCGSVLKGLNKRLSNKPTISVGDNKGLDEAIEFLEEYV

SEQ ID NO: 6953 - protein, 259 aa, Helicobacter pylori
  misc_feature (B) LOCATION 1...259
  hypothetical: YES
MSLAPSVMAGFLFCAGSCSLRFPNYSKIISIDVDTVFLGDVASAYFALDNEPTKLLGMVRDTFSHLPFEAFCDFCERTCKNFKIDLLRFSQNELKRIHQGFNMGFLVANLDLWRENGFEKIALEFLKTRGKDLFYPEQCLINMVFLERILELPIHYNCYSDFFKEHYPKSIIMLHFIKYKPWRSVSSLNGRLICYEAEASFWLANLFCTPFKNDFFKERLEMAKDQQMQSFKTHIRSKTIRDYFYFRIKNILKKVFELS

SEQ ID NO: 6954 - protein, 322 aa, Helicobacter pylori
  misc_feature (B) LOCATION 1...322
  hypothetical: YES
PLKSKASKLLGANIVYKIHCLVKGVTLEQQNKLLKTIEPFKKFASLEFIDINSLDYSIESYLNESCSKRYGGLLVLCRLLLASLFPNYSKIISIDVDTVFLGDVASAYFALDNEPTKLLGMVRDTFSHLPFEAFCDFCERTCKNFKIDLLRFSQNELKRIHQGFNMGFLVANLDLWRENGFEKIALEFLKTRGKDLFYPEQCLINMVFLERILELPIHYNCYSDFFKEHYPKSIIMLHFIKYKPWRSVSSLNGRLICYEAEASFWLANLFCTPFKNDFFKERLEMAKDQQMQSFKTHIRSKTIRDYFYFRIKNILKKVFELS

SEQ ID NO: 6955 - protein, 367 aa, Helicobacter pylori
  misc_feature (B) LOCATION 1...367
  hypothetical: YES
MDTQNLSDQIIPIFMSFDKNYALGAGVSLYSLLSHASRHTSMIDFSPLNQSNKLLGANIVYKIHCLVKGVTLEQQNKLLKTIEPFKKFASLEFIDINSLDHSIESYLNESCSKRYGGLLVLCRLLLASLFPNYSKIISIDVDTVFLGDVASAYFALDNEPTKLLGMVRDTFSHLPFEAFCDFCERTCKNFKIDLLRFSQNELKRIHQGFNMGFLVANLDLWRENGFEKIALEFLKTRGKDLFYPEQCLINMVFLERILELPIHYNCYSDFFKEHYPKSIIMLHFIKYKPWRSVSSLNGRLICYEAEASFWLANLFCTPFKNDFFKERLEMAKDQQMQSFKTHIRSKTIRDYFYFRIKNILKKVFELS

SEQ ID NO: 6956 - protein, 360 aa, Helicobacter pylori
  misc_feature (B) LOCATION 1...360
  hypothetical: YES
MPTILVSALEASSNIHLEELRHNLPKDYRFIGVFESKEALYSPREFSIMGFRDVIGRLGFLLKAHKEMVQLAKQADMVLLMDSSSFNIPLAKKIKKQDPHKKIMYYILPQVWAWKKWRAKSLEKYCDFLGAILPFEVGYYQKKAQYVGHPLLDEIKYYKKDIKGETLVFMPGSRKSEIAKMFPLFVKAAQILEQNEGFKRRVLVVPSFFKGLDLKALYGEDIKLFEISYDAHKSLFEAEFAFICSGTATLEAALIGTPFALAYRAKTMDFLIARMLVNLHYIGLANIFYNALNNETPGLGESQLHPELIQHFLSVEGLLKAYEEMDRERYFKESLRLREYLKHGSARKIAEEMAFLLNLT

SEQ ID NO: 6957 - protein, 375 aa, Helicobacter pylori
  misc_feature (B) LOCATION 1...375
  hypothetical: YES
RNQALSSPKPFERQIMPTILVSALEASSNIHLEELRHNLPKDYRFIGVFESKEALYSPREFSIMGFRDVIGRLGFLLKAHKEMVQLAKQADMVLLMDSSSFNIPLAKKIKKQDPHKKIMYYILPQVWAWKKWRAKSLEKYCDFLGAILPFEVGYYQKKAQYVGHPLLDEIKYYKKDIKGETLVFMPGSRKSEIAKMFPLFVKAAQILEQNEGFKRRVLVVPSFFKGLDLKALYGEDIKLFEISYDAHKSLFEAEFAFICSGTATLEAALIGTPFALAYRAKTMDFLIARMLVNLHYIGLANIFYNALNNETPGLGESQLHPELIQHFLSVEGLLKAYEEMDRERYFKESLRLREYLKHGSARKIAEEMAFLLNLT

SEQ ID NO: 6958 - protein, 244 aa, Helicobacter pylori
  misc_feature (B) LOCATION 1...244
  hypothetical: YES
MKKAGFLFLAAMAIIVVSLNAKDPNVLRKIVFEKCLPNYEKNQNPSPCIEVKPDAGYVVLKDINGPLQYLLMPTTHISGIENPLLLDPSTPNFFYLSWQARDFMSKKYGKPIPDYAISLTINSKKGRSQNHFHIHISCISLDVRKQLDNNLKNINSRWSPLSGGLNGHKYLARRVTESELAQKSPFVMLAKEVPNAHKRMGDYGLAVVQQSDNSFVLLATQFNPLTLNRASAEEIQDHECAILR

SEQ ID NO: 6959 - protein, 298 aa, Helicobacter pylori
  misc_feature (B) LOCATION 1...298
  hypothetical: YES
LVFKKPFFKNRLLNVTNKLKFVKITIMIKDFNHYCRKITRGFVKIPTKKQGAKKMKKAGFLFLAAMAIIVVSLNAKDPNVLRKIVFEKCLPNYEKNQNPSPCIEVKPDAGYVVLKDINGPLQYLLMPTTHISGIENPLLLDPSTPNFFYLSWQARDFMSKKYGKPIPDYAISLTINSKKGRSQNHFHIHISCISLDVRKQLDNNLKNINSRWSPLSGGLNGHKYLARRVTESELAQKSPFVMLAKEVPNAHKRMGDYGLAVVQQSDNSFVLLATQFNPLTLNRASAEEIQDHECAILR

SEQ ID NO: 6960 - protein, 292 aa, Helicobacter pylori
  misc_feature (B) LOCATION 1...292
  hypothetical: YES
MKRRDFIKTTALGATGAVLGAQILQAEESKGSVAKKYKIEAEYSIDFDSAEHTSLFIPMPSVAASNVHLQGNHASYESMLNFGVPYLQVEFLKSTQKKRVHLSYEIASYQLNERLFDASDFVAMGRYERDDASVANIANQLKGATPKESVRNFYAFIKHDMPKRQKALEGKENLPKRDSLPWFATISQESMFVSLCHACGIKSAEVQGLKLAQNSVVENASRVEVYLKDSLLAFDFQNNHKEVFIPLNRHKDMQLDTALLATFGDAFALVDGRDLGNYESKLFEKRVSYTIV

SEQ ID NO: 6961 - protein, 296 aa, Helicobacter pylori
  misc_feature (B) LOCATION 1...296
  hypothetical: YES
RVIVMKRRDFIKTTALGATGAVLGAQILQAEESKGSVAKKYKIEAEYSIDFDSAEHTSLFIPMPSVAASNVHLQGNHASYESMLNFGVPYLQVEFLKSTQKKRVHLSYEIASYQLNERLFDASDFVAMGRYERDDASVANIANQLKGATPKESVRNFYAFIKHDMPKRQKALEGKENLPKRDSLPWFATISQESMFVSLCHACGIKSAEVQGLKLAQNSVVENASRVEVYLKDSLLAFDFQNNHKEVFIPLNRHKDMQLDTALLATFGDAFALVDGRDLGNYESKLFEKRVSYTIV

SEQ ID NO: 6962 - protein, 51 aa, Helicobacter pylori
  misc_feature (B) LOCATION 1...51
  hypothetical: YES
VNFYLSPKDYHHYHAPCDLEILEARYFAGKLLPVNKPSLHKKQNLFVGNER

SEQ ID NO: 6963 - protein, 127 aa, Helicobacter pylori
  misc_feature (B) LOCATION 1...127
  hypothetical: YES
RLVILRGNYYQSISPHYTKTKICLWAMKGSRLLQKTIQGNKLYFVAVGALNVGKMRFNFDKNIQTNAKARFMQTYSYNPPIKVKKGDNLGNFEMGSTIVLFIQNTAFKDLKEKSVKFGESIGEFHAN

SEQ ID NO: 6964 - protein, 193 aa, Helicobacter pylori
  misc_feature (B) LOCATION 1...193
  hypothetical: YES
GRGGIYIEHGRVKMVALSNALSRVFGSVAGYKFPSFIQKSINALYVKIFKIDLSEFEPLENYKSLNALFMRSLKKERPFDKAPNICIAPCDALITECAFLDNDSALQIKGMPYKAHELVGEINPLSPSFFYVNFYLSPKDYHHYHAPCDLEILEARYFAGKLLPVNKPSLHKNKNLFVGNERVALVAKDDSRQ

SEQ ID NO: 6965 - protein, 267 aa, Helicobacter pylori
  misc_feature (B) LOCATION 1...267
  hypothetical: YES
MVALSNALSRVFGSVAGYKFPSFIQKSINALYVKIFKIDLSEFEPLENYKSLNALFMRSLKKERPFDKAPNICIAPCDALITECAFLDNDSALQIKGMPYKAHELVGEINPLSPSFFYVNFYLSPKDYHHYHAPCDLEILEARYFAGKLLPVNKPSLHKNKNLFVGNERVALVAKDIQGNKLYFVAVGALNVGKMRFNFDKNIQTNAKARFMQTYSYNPPIKVKKGDNLGNFEMGSTIVLFIQNTAFKDLKEKSVKFGESIGEFHAN

SEQ ID NO: 6966 - protein, 75 aa, Helicobacter pylori
  misc_feature (B) LOCATION 1...75
  hypothetical: YES
MEFYASLKSIAMHVPSERVKNAEFQQFLDTSDEWIEKRTGIKERRFANDEEKSSDLGVIAAKQAIERAHLTPQDI

SEQ ID NO: 6967 - protein, 142 aa, Helicobacter pylori
  misc_feature (B) LOCATION 1...142
  hypothetical: YES
VEMIHTQDYIKMEEAATEAIKRKESSIYLGMDILKNGADALISAGHSGATMGLATLRLGRIKGVERPAICTLMPSVGKRPSVLLDAGANTDCKPEYLIDFALMGYEYAKSVLHYDSPKVGLLSNGEEDIKGGIRSLKKRIKC

SEQ ID NO: 6968 - protein, 339 aa, Helicobacter pylori
  misc_feature (B) LOCATION 1...339
  hypothetical: YES
MKIVIDLMGADHGVLPIIEGVSRALENKSFSVVLVGDKDKATPFISKELASKVEMIHTQDYIKMEEAATEAIKRKESSIYLGMDILKNGADALISAGHSGATMGLATLRLGRIKGVERPAICTLMPSVGKRPSVLLDAGANTDCKPEYLIDFALMGYEYAKSVLHYDSPKVGLLSNGEEDIKGNTLVKETHKMLKAYDFFYGNVEGSDIFKGVVDVVVCDGFMGNVVLKTTEGVASAIGSIFKDEIKSSFKSKMGALMLKNAFGILKQKTDYAEYGGAPLLGVNKSVIISHGKSNARAVECAIYQAISAVESQVCLRITQAFESLKSQSFESQSDQQDA

SEQ ID NO: 6969 - protein, 342 aa, Helicobacter pylori
  misc_feature (B) LOCATION 1...342
  hypothetical: YES
GRMMKIVIDLMGADHGVLPIIEGVSRALENKSFSVVLVGDKDKATPFISKELASKVEMIHTQDYIKMEEAATEAIKRKESSIYLGMDILKNGADALISAGHSGATMGLATLRLGRIKGVERPAICTLMPSVGKRPSVLLDAGANTDCKPEYLIDFALMGYEYAKSVLHYDSPKVGLLSNGEEDIKGNTLVKETHKMLKAYDFFYGNVEGSDIFKGVVDVVVCDGFMGNVVLKTTEGVASAIGSIFKDEIKSSFKSKMGALMLKNAFGILKQKTDYAEYGGAPLLGVNKSVIISHGKSNARAVECAIYQAISAVESQVCLRITQAFESLKSQSFESQSDQQDA

SEQ ID NO: 6970 - protein, 73 aa, Helicobacter pylori
  misc_feature (B) LOCATION 1...73
  hypothetical: YES
VLVRGLRVVSDFEYELQMGYANKSLNHELETLYFMPTLQNAFISSSIVRSIIAHKGDASHLVPKEIYPFISKV

SEQ ID NO: 6971 - protein, 78 aa, Helicobacter pylori
  misc_feature (B) LOCATION 1...78
  hypothetical: YES
MQKIGIYPGTFDPVTNGHIDIIHRSSELFEKLIVAVAHSSAKNPMFSLDERLKMMQLATKSFKNVECVAFEGLLSRSG

SEQ ID NO: 6972 - protein, 83 aa, Helicobacter pylori
  misc_feature (B) LOCATION 1...83
  hypothetical: YES
ADLAKEYHCKVLVRGLRVVSDFEYELQMGYANKSLNHELETLYFMPTLQNAFISSSIVRSIIAHKGDASHLVPKEIYPFISKV

SEQ ID NO: 6973 - protein, 87 aa, Helicobacter pylori
  misc_feature (B) LOCATION 1...87
  hypothetical: YES
LIPTMGNELMQKIGIYPGTFDPVTNGHIDIIHRSSELFEKLIVAVAHSSAKNPMFSLDERLKMMQLATKSFKNVECVAFEGLLSRSG

SEQ ID NO: 6974 - protein, 60 aa, Helicobacter pylori
  misc_feature (B) LOCATION 1...60
  hypothetical: YES
MCMRHFPNKPIFPGVLIVEGMAQTGGFLAFTSLWGFDPEIAKQKKSVYFMTIDKVKFRIP

SEQ ID NO: 6975 - protein, 159 aa, Helicobacter pylori
  misc_feature (B) LOCATION 1...159
  hypothetical: YES
MEQSHQNLQSQFFIEHILQILPHRYPMLLVDRIIELQANQKIVAYKNITFNEDVFNGHFPNKPIFPGVLIVEGMAQTGGFLAFTSLWGFDPEIAKTKIVYFMTIDKVKFRIPVTPGDRLEYHLEVLKHKGMIWQVGGTAQVDGKVVAEAELKAMIAERE

SEQ ID NO: 6976 - protein, 104 aa, Helicobacter pylori
  misc_feature (B) LOCATION 1...104
  hypothetical: YES
VKRFEMRFLERFLSPSEIVLCKDKSSSIAGFFALKEACSKALQVGIGKELSFLDMRISKSPKNAPLITLSKEKMDYFNIQSLSASISHDAGFAIAVVMVSSSNL

SEQ ID NO: 6977 - protein, 119 aa, Helicobacter pylori
  misc_feature (B) LOCATION 1...119
  hypothetical: YES
MIGIDIVSIARIEKCVKRFEMRFLERFLSPSEIVLCKDKSSSIAGFFALKEACSKALQVGIGKELSFLDMRISKSPKNAPLITLSKEKMDYFNIQSLSASISHDAGFAIAVVMVSSSNL

SEQ ID NO: 6978 - protein, 119 aa, Helicobacter pylori; identical to SEQ ID NO: 6977
  misc_feature (B) LOCATION 1...119
  hypothetical: YES

SEQ ID NO: 6979 - protein, 289 aa, Helicobacter pylori
  misc_feature (B) LOCATION 1...289
  hypothetical: YES
MGFADFFKNFKINKLRTTPSKEEQPSHWVKCPKCYALMYYKEVFGKYSVCLKCHYHFRMNATERIEFLCDVGSFEEFDKHLRPNDPLNFVDKESYKQRIKKYEKRTNRPSSVISGEAKINRMPLQIVVFDFSFMGGSLGSVEGEKIVRAINRAVAKKEALLIVSASGGARMQESTYSLMQMAKTSAALNRLSEAKLPFISLLSDPTYGGVSASFAFLGDLIIAEPGAMIGFAGPRVIKQTIGADLPEGFQTAEFLLEHGLIDMIVHRKDLKKTLSDLIAMMTHKTSKIF

SEQ ID NO: 6980 - protein, 305 aa, Helicobacter pylori
  misc_feature (B) LOCATION 1...305
  hypothetical: YES
AKLGYNPNKTAKLRKNMGFADFFKNFKINKLRTTPSKEEQPSHWVKCPKCYALMYYKEVFGKYSVCLKCHYHFRMNATERIEFLCDVGSFEEFDKHLRPNDPLNFVDKESYKQRIKKYEKRTNRPSSVISGEAKINRMPLQIVVFDFSFMGGSLGSVEGEKIVRAINRAVAKKEALLIVSASGGARMQESTYSLMQMAKTSAALNRLSEAKLPFISLLSDPTYGGVSASFAFLGDLIIAEPGAMIGFAGPRVIKQTIGADLPEGFQTAEFLLEHGLIDMIVHRKDLKKTLSDLIAMMTHKTSKIF

SEQ ID NO: 6981 - protein, 491 aa, Helicobacter pylori
  misc_feature (B) LOCATION 1...491
  hypothetical: YES
MRAGIKRQSKEKRVFRNDNTQRVIQSAIAIPEEVRVYEFAQKANLNLADVIKTLFNLGLMVTKNDFLDKDSIEILAEEFHLEISVQNTLEEFEVEEVLEGVKKERPPVVTIMGHVDHGNTSLLDKIRDKRVAHTEAGGITQHIGAYMVEKNNKWVSFIDTPGHEAFSQMRNRGAQVTDIAVIVIAADDGVKQQTIEALEHAKAANVPVIFAMNKMDKPNVNPDKLKAECAELGYNPVDWGGEHEFIPVSAKTGDGIDNLLETILIQADIMELKAIEEGSARAVVLEGSVEKGRGAVATVIVQSGTLSVGDSFFAETAFGKVRTMTDDQGKSIQNLKPSMVALITGLSEVPPAGSVLIGVENDSIARLQAQKRATYLRQKALSKSTKVSFDELSEMVANKELKNIPVIIKADTQGSLEAIKNSLLELNNEEVAIQVIHSGVGGITENDLSLVSSSEHAVILGFNIRPTGNVKNKAKEYNSASITRIYVLFEK

SEQ ID NO: 6982 - protein, 605 aa, Helicobacter pylori
  misc_feature (B) LOCATION 1...605
  hypothetical: YES
MRAGIKRQSKKKRVFRNDNSQKVIQSAIAIPEEVRVYEFAQKANLNLADVIKTLFNLGLMVTKNDFLDKDSIEILAEEFHLEISVQNTLEEFEVEEVLEGVKKERPPVVTIMGHVDHGKTSLLDKIRDKRVAHTEAGGITQHIGAYMVEKNNKWVSFIDTPGHEAFSQMRNRGAQVTDIAVIVIAADDGVKQQTIEALEHAKAANVPVIFAMNKMDKPNVNPDKLKAECAELGYNPVDWGGEHEFIPVSAKTGDGIDNLLETILIQADIMELKAIEEGSARAVVLEGSVEKGRGAVATVIVQSGTLSVGDSFFAETAFGKVRTMTDDQGKSIQNLKPSMVALITGLSEVPPAGSVLIGVENDSIARLQAQKRATYLRQKALSKSTKVSFDELSEMVANKELKNIPVIIKADTQGSLEAIKNSLLELNNEEVAIQVIHSGVGGITENDLSLVSSSEHAVILGFNIRPTGNVKNKAKEYNVSIKTYTVIYALIEGMRSLLLGLMSPIIEEEHTGQAEVRETFNIPKVGTIAGCVVSDGEIARGIKARLIRDGVVVHTGEILSLKRFKDDVKEVSKGYECGIMLDNYNEIKVGDVFETYKEIHKKRTL

SEQ ID NO: 6983 - protein, 76 aa, Helicobacter pylori
  misc_feature (B) LOCATION 1...76
  hypothetical: YES
AWGKKFDVKIIDIDPKNRRLRVSLKQLTNRPFDVFESKHQVGDIVEGKVATLTDFGAFFESGWGGWLAPQSRRFLG

SEQ ID NO: 6984 - protein, 82 aa, Helicobacter pylori
  misc_feature (B) LOCATION 1...82
  hypothetical: YES
RILGRFLNLGGVDGLLHNHDAFWDKDKKCKDHYKIGDVIKVKILKINKKDKKISLSAKHLVTSPTEEFAQKHKTDSVIQGKW

SEQ ID NO: 6985 - protein, 179 aa, Helicobacter pylori
  misc_feature (B) LOCATION 1...179
  hypothetical: YES
VKKGYNPPKEFYIYFIVRQSMSKIADDQYFNDEEEDFAKLLEKEETLEKGTIKEGLIVSINENDGYAMVSVGGKTEGRLALNEITDEKGQLMYQKNDPIVVHVSEKGEHPSVSYKKAISQQKIQAKIEELGENYENAIIEGKIVGKNKGGYIVESQGVEYFLSRSHSSLKNDANHIGKR

SEQ ID NO: 6986 - protein, 476 aa, Helicobacter pylori
  misc_feature (B) LOCATION 1...476
  hypothetical: YES
MSKIADDQYFNDEEEDFAKLLEKEETLEKGTIKEGLIVSINENDGYAMVSVGGKTEGRLALNEITDEKGQLMYQKNDPIVVHVSEKGEHPSVSYKKAISQQKIQAKIEELGENYENAIIEGKIVGKNKGGYIVESQGVEYFLSRSHSSLKNDANHIGKRIKACIIRVDKENHSINISRKRFFEVNDKRQLEISKELLEATEPVLGVVRQITPFGIFVKFKGIDGLVHYSEISHKGPVNPEKYYKEGDEVYVKAIAYDEEKRRLSLSIKATIEDPWEEIQDKLKPGYAIKVVVSNIEHYGVFVDIGNDIEGFLHVSEISWDKNVSHPSHYLSVGQEIDVKIIDIDPKNRRLRVSLKQLTNRPFDVFESKHQVGDIVEGKVATLTDFGAFLNLGGVDGLLHNHDAFWDKDKKCKDHYKIGDVIKVKILKINKKDKKISLSAKHLVTSPTEEFAQKHKTDSVIQGKVVSIKDFGVFISC

SEQ ID NO: 6987 - protein, 552 aa, Helicobacter pylori
  misc_feature (B) LOCATION 1...552
  hypothetical: YES
MSKIADDQYFNDEEEDFAKLLEKEETLEKGTIKEGLIVSINENDGYAMVSVGGKTEGRLALNEITDEKGQLMYQKNDPIVVHVSEKGEHPSVSYKKAISQQKIQAKIEELGENYENAIIEGKIVGKNKGGYIVESQGVEYFLSRSHSSLKNDANHIGKRIKACIIRVDKENHSINISRKRFFEVNDKRQLEISKELLEATEPVLGVVRQITPFGIFVKFKGIDGLVHYSEISHKGPVNPEKYYKEGDEVYVKAIAYDEEKRRLSLSIKATIEDPWEEIQDKLKPGYAIKVVVSNIEHYGVFVDIGNDIEGFLHVSEISWDKNVSHPSHYLSVGQEIDVKIIDIDPKNRRLRVSLKQLTNRPFDVFESKHQVGDIVEGKVATLTDFGAFLNLGGVDGLLHNHDAFWDKDKKCKDHYKIGDVIKVKILKINKKDKKISLSAKHLVTSPTEEFAQKHKTDSVIQGKVVSIKDFGVFIHADGIDVLIKNEDLNPLKKDEIKIGQEITCVVVAIEKSNNKVRASVHRLERKKEKEELQAFNTSDDKMTLGDILKEKL

SEQ ID NO: 6988 - protein, 436 aa, Helicobacter pylori
  misc_feature (B) LOCATION 1...436
  hypothetical: YES
MNDPKHVVYVWLDALLNYASALGYLNGLDNKMAHFERARHIVGKDILRFHAIYWPAFLMSLNLPLFKQLCVHGWWTIEGVKMSKSLGNVLDAQKLAMEYGIEELRYFLLREVPFGQDGDFSKKALVERINANLNNDLGNLLNRLLGMAKKYFNYSLKSTKITAYYPKELEKAHQILDNANSFVPKMQLHKALEELFNIYDFLNKLIAKEEPWVLHKNNESEKLEALLSLIANTLLQSSFLLYAFMPKSAMKLASAFRVEITPNNYERFFKAKKLQDMVLQDTEPLFSKIEKIEKIEKIEKIEKIEKGEEALAEKAEKKEKEKAPPTQENYISIEDFKKVEIKVGLIKEAQRIEKSNKLLRLKVDLGENRLRQIISGIALDYEPESLVGQMVCVVANLKPAKLMGEMSEGMILAVRDNDNLALISPTREKIAGSLIS

SEQ ID NO: 6989 - protein, 656 aa, Helicobacter pylori
  misc_feature (B) LOCATION 1...656
  hypothetical: YES
MQKSLITTPIYYVNDIPHIGHAYTTLIADTLKKYYTLQGEEVFFLTGTDEHGQKIEQSARLRNQSPKAYADSISAIFKNQWDFFNLDYDGFIRTTDSEHQKCVQNAFEIMFEKGDIYKGTYSGYYCVSCESYCAVSKVDNTDSKVLCPDCLRETTLLEEESYFFKLSAYEKPLLEFYAKNPEAILPIYRKNEVTSFIEQGLLDLSITRTSFEWGIPLPKKMNDPKHVVYVWLDALLNYASALGYLNGLDNKMAHFERARHIVGKDILRFHAIYWPAFLMSLNLPLFKQLCVHGWWTIEGVKMSKSLGNVLDAQKLAMEYGIEELRYFLLREVPFGQDGDFSKKALVERINANLNNDLGNLLNRLLGMAKKYFNYSLKSTKITAYYPKELEKAHQILDNANSFVPKMQLHKALEELFNIYDFLNKLIAKEEPWVLHKNNESEKLEALLSLIANTLLQSSFLLYAFMPKSAMKLASAFRVEITPNNYERFFKAKKLQDMVLQDTEPLFSKIEKIEKIEKIEKIEKIEKGEEALAEKAEKKEKEKAPPTQENYISIEDFKKVEIKVGLIKEAQRIEKSNKLLRLKVDLGENRLRQIISGIALDYEPESLVGQMVCVVANLKPAKLMGEMSEGMILAVRDNDNLALISPTREKIAGSLIS

SEQ ID NO: 6990 - protein, 662 aa, Helicobacter pylori
  misc_feature (B) LOCATION 1...662
  hypothetical: YES
GNTIIKMQKSLITTPIYYVNDIPHIGHAYTTLIADTLKKYYTLQGEEVFFLTGTDEHGQKIEQSARLRNQSPKAYADSISAIFKNQWDFFNLDYDGFIRTTDSEHQKCVQNAFEIMFEKGDIYKGTYSGYYCVSCESYCAVSKVDNTDSKVLCPDCLRETTLLEEESYFFKLSAYEKPLLEFYAKNPEAILPIYRKNEVTSFIEQGLLDLSITRTSFEWGIPLPKKMNDPKHVVYVWLDALLNYASALGYLNGLDNKMAHFERARHIVGKDILRFHAIYWPAFLMSLNLPLFKQLCVHGWWTIEGVKMSKSLGNVLDAQKLAMEYGIEELRYFLLREVPFGQDGDFSKKALVERINANLNNDLGNLLNRLLGMAKKYFNYSLKSTKITAYYPKELEKAHQILDNANSFVPKMQLHKALEELFNIYDFLNKLIAKEEPWVLHKNNESEKLEALLSLIANTLLQSSFLLYAFMPKSAMKLASAFRVEITPNNYERFFKAKKLQDMVLQDTEPLFSKIEKIEKIEKIEKIEKIEKGEEALAEKAEKKEKEKAPPTQENYISIEDFKKVEIKVGLIKEAQRIEKSNKLLRLKVDLGENRLRQIISGIALDYEPESLVGQMVCVVANLKPAKLMGEMSEGMILAVRDNDNLALISPTREKIAGSLIS

SEQ ID NO: 6991 - protein, 143 aa, Helicobacter pylori
  misc_feature (B) LOCATION 1...143
  hypothetical: YES
MQEIEIFCDGSSLGNPGPGGYAAILRYKDKEKTISGGENFTTNNRMELRALNEALKILKRPCHITLYSDSQYVCQAINVWLVNWQKKNFAKVKNVDLWKEFVKVSKGHSIVAVWIKGHNGHAENERCNSLAKLEAQKRVKTTT

SEQ ID NO: 6992 - protein, 163 aa, Helicobacter pylori
  misc_feature (B) LOCATION 1...163
  hypothetical: YES
RLWIWCLKSLKKRMLWEWIKMQEIEIFCDGSSLGNPGPGGYAAILRYKDKEKTISGGENFTTNNRMELRALNEALKILKRPCHITLYSDSQYVCQAINVWLVNWQKKNFAKVKNVDLWKEFVKVSKGHSIVAVWIKGHNGHAENERCNSLAKLEAQKRVKTTT

SEQ ID NO: 6993 - protein, 741 aa, Helicobacter pylori
  misc_feature (B) LOCATION 1...741
  hypothetical: YES
RFGRLGLEVESCIPCIAPKNVVVGKVLEKAPHKNAEKLSVCQVDVGKEVLPVVCGAKNVAPNQFAPVALKGAIIGSTTIAKTELRGVESHGMICSSIELGFPKINDGILELDESVGELVLGKELHEYAPFNTHVLEISLTPNRGDCLSVLGIAREISAFYHTPLKPIKALNFTPTSDLITLSADENIESHLAYYLICNHSLKTPLNIKLSLAHNNALSENDLNNFIEFSAHFSGVILNAYSLNKTPIDLIIKNDENNLESVYINHQKRSTIVIKHQDQKDLSECLLLEASYTDPVSLSLKLHALKDKTLQKDNALVYRSTRGSNPNLSDGLNFLSAHLKAAILESKQTEHSLKDCALTFQLEDITEILGLVIEAEKIQNILKNLGFKVSTKEPNSKPQILEVIVPNFRHDIKTIQDIAEEILRFVGIDNLVSKPLHCVSSKNSNPHYDTHRFFENLKHKALACGFKEVIHYVFYSKEKQQKLGFEVLEDPLELQNPITTELNTLRTSLVCGLLDASLRNKNLGFKSIALYEKGSVYNSKREEIQKLGFLVSGLQKKESYPHAKGKAWDFYSFAECVSRIIGDFSLEKLTTQTPINHPYQSAKIIQNNEIIGVIAKIHPKVIQELDLFESYYAEIDASKLKRPAMLLKPFSIYPSSVRDLTLIIDENTAFSKIKKALKDAQIPNLSEILPLDIFKESGNTIALSVRCVIHSLEKTLNDEEVNSAVQKALEILEKEFNARLKG

SEQ ID NO: 6994 - protein, 764 aa, Helicobacter pylori
  misc_feature (B) LOCATION 1...764
  hypothetical: YES
MKLSVNDLNVFVNTPKDIAKLCEDLSRLGLEVESCIPCIAPKNVVVGKVLEKAPHKNAEKLSVCQVDVGKEVLPVVCGAKNVAPNQFAPVALKGAIIGSTTIAKTELRGVESHGMICSSIELGFPKINDGILELDESVGELVLGKELHEYAPFNTHVLEISLTPNRGDCLSVLGIAREISAFYHTPLKPIKALNFTPTSDLITLSADENIESHLAYYLICNHSLKTPLNIKLSLAHNNALSENDLNNFIEFSAHFSGVILNAYSLNKTPIDLIIKNDENNLESVYINHQKRSTIVIKHQDQKDLSECLLLEASYTDPVSLSLKLHALKDKTLQKDNALVYRSTRGSNPNLSDGLNFLSAHLKAAILESKQTEHSLKDCALTFQLEDITEILGLVIEAEKIQNILKNLGFKVSTKEPNSKPQILEVIVPNFRHDIKTIQDIAEEILRFVGIDNLVSKPLHCVSSKNSNPHYDTHRFFENLKHKALACGFKEVIHYVFYSKEKQQKLGFEVLEDPLELQNPITTELNTLRTSLVCGLLDASLRNKNLGFKSIALYEKGSVYNSKREEIQKLGFLVSGLQKKESYPHAKGKAWDFYSFAECVSRIIGDFSLEKLTTQTPINHPYQSAKIIQNNEIIGVIAKIHPKVIQELDLFESYYAEIDASKLKRPAMLLKPFSIYPSSVRDLTLIIDENTAFSKIKKALKDAQIPNLSEILPLDIFKESGNTIALSVRCVIHSLEKTLNDEEVNSAVQKALEILEKEFNARLKG

SEQ ID NO: 6995 - protein, 328 aa, Helicobacter pylori
  misc_feature (B) LOCATION 1...328
  hypothetical: YES
LHTLIERLEKVTNSKELEEARLNALGKKGVFADKFNQLKNLNGEEKNAFAKEIHHYKQAFEKAFELKKKAIMELELEERLKKEKIDVSLFNAIKTSSSHPLNYTKNKIIEFFTPLGYKLEIGSLVEDDFHNFSALNLPPYHPARDMQDTFYFKDHKLLRTHTSPVQIHTMQEQTPPIKMICLGETFRCDYDLTHTPMFHQIEGLVVDQKGNIRFTHLKGVIEDFLHYFFGGVKLRWRSSFFPFTEPSAEVDISCVFCKQEGCRVCSHTGWLEVLGCGMVNNAVFEAIGYENVSGFAFGMGIERLAMLTCQINDLRSFFETDLRVLESF

SEQ ID NO: 6996 - protein, 331 aa, Helicobacter pylori
  misc_feature (B) LOCATION 1...331
  hypothetical: YES
GSLLHTLIERLEKVTNSKELEEARLNALGKKGVFADKFNQLKNLNGEEKNAFAKEIHHYKQAFEKAFELKKKAIMELELEERLKKEKIDVSLFNAIKTSSSHPLNYTKNKIIEFFTPLGYKLEIGSLVEDDFHNFSALNLPPYHPARDMQDTFYFKDHKLLRTHTSPVQIHTMQEQTPPIKMICLGETFRCDYDLTHTPMFHQIEGLVVDQKGNIRFTHLKGVIEDFLHYFFGGVKLRWRSSFFPFTEPSAEVDISCVFCKQEGCRVCSHTGWLEVLGCGMVNNAVFEAIGYENVSGFAFGMGIERLAMLTCQINDLRSFFETDLRVLESF

SEQ ID NO: 6997 - protein, 149 aa, Helicobacter pylori
  misc_feature (B) LOCATION 1...149
  hypothetical: YES
MKVLLLEDVKNLGKAGEVCEVKDGYGNNFLIANQKAKLATNEVINKYKAEVKKKAEKEALEKAQKLQMVETLQTITLTIHKKVGANGSLFGAITKEEITERLKEQHASLNLDKKDIELKHPIKSTGIYEIEVKLGSGIAGVFKIDVVAE

SEQ ID NO: 6998 - protein, 172 aa, Helicobacter pylori
  misc_feature (B) LOCATION 1...172
  hypothetical: YES
AIKTQLVKIKSIITNYLQLKGDMMKVLLLEDVKNLGKAGEVCEVKDGYGNNFLIANQKAKLATNEVINKYKAEVKKKAEKEALEKAQKLQMVETLQTITLTIHKKVGANGSLFGAITKEEITERLKEQHASLNLDKKDIELKHPIKSTGIYEIEVKLGSGIAGVFKIDVVAE

SEQ ID NO: 6999 - protein, 112 aa, Helicobacter pylori
  misc_feature (B) LOCATION 1...112
  hypothetical: YES
NDFRACAKPCGSVDEPLQMQIFTLDYDNYVGKIGIARVFNGSVKKNESVLLMKSDGSKENGRITKLIGFLGLARTEIENAYAGDIVALAGFNAMDVGDSVVDPTNPMPLDPM

SEQ ID NO: 7000 - protein, 231 aa, Helicobacter pylori
  misc_feature (B) LOCATION 1...231
  hypothetical: YES
YCVILLISILLVRTFMKNIRNIAVIAHVDHGKTTLVDGLLSQSGTFSEREKVDERVMDSNDLEKERGITILSKNTAIYYKDTKINIIDTPGHADFGGEVERVLKMVDGVLLLVDAQEGVMPQTKFVVKKALSFGICPIVVVNKIDKPAAEPDRVVDEVFDLFVAMGASDKQLDFPVVYAAARDGYAMKSLDDEKKNLEPLFETILEHVPSPAGALMSLCKCKFSRLIMTIM

SEQ ID NO: 7001 - protein, 305 aa, Helicobacter pylori
  misc_feature (B) LOCATION 1...305
  hypothetical: YES
TKLKYPRFGRAWNEVYLLSRFALAGLEGKHVTANKLKDRLLKEMQTNIAMKCEEMGEGKFKVSGRGELQITILAENLRREGFEFSISRPEVIIKEENGVKCEPFEHLVIDTPQDFSGAIIERLGKRKAEMKAMNPMSDGYTRLEFEIPARGLIGYRSEFLTDTKGEGVMNHSFLEFRPFSGSVESRKNGALISMENGEATAFSLFNIQERGALFINPQTKVYVGMVIGEHSRDNDLDVNPIKSKHLTNMRASGSDDAIKLTPPRTMVLERALEWIEEDEILEVTPLNLRIRKKILDPNMRKRAKK

SEQ ID NO: 7002 - protein, 599 aa, Helicobacter pylori
  misc_feature (B) LOCATION 1...599
  hypothetical: YES
MKNIRNIAVIAHVDHGKTTLVDGLLSQSGTFSEREKVDERVMDSNDLEKERGITILSKNTAIYYKDTKINIIDTPGHADFGGEVERVLKMVDGVLLLVDAQEGVMPQTKFVVKKALSFGICPIVVVNKIDKPAAEPDRVVDEVFDLFVAMGASDKQLDFPVVYAAARDGYAMKSLDDEKKNLEPLFETILEHVPSPSGSVDEPLQMQIFTLDYDNYVGKIGIARVFNGSVKKNESVLLMKSDGSKENGRITKLIGFLGLARTEIENAYAGDIVALAGFNAMDVGDSVVDPTNPMPLDPMHLEEPTMSVYFAVNDSPLAGLEGKHVTANKLKDRLLKEMQTNIAMKCEEMGEGKFKVSGRGELQITILAENLRREGFEFSISRPEVIIKEENGVKCEPFEHLVIDTPQDFSGAIIERLGKRKAEMKAMNPMSDGYTRLEFEIPARGLIGYRSEFLTDTKGEGVMNHSFLEFRPFSGSVESRKNGALISMENGEATAFSLFNIQERGALFINPQTKVYVGMVIGEHSRDNDLDVNPIKSKHLTNMRASGSDDAIKLTPPRTMVLERALEWIEEDEILEVTPLNLRIRKKILDPNMRKRAKK

SEQ ID NO: 7003 - protein, 62 aa, Helicobacter pylori
  misc_feature (B) LOCATION 1...62
  hypothetical: YES
MAKRCALTFKGPMIGNHVSHANNKNKRRLLPNLRSIKIQLDDGTTKRIKVAASTLRTMRKGA

SEQ ID NO: 7004 - protein, 65 aa, Helicobacter pylori
  misc_feature (B) LOCATION 1...65
  hypothetical: YES
GYTMAKRCALTFKGPMIGNHVSHANNKNKRRLLPNLRSIKIQLDDGTTKRIKVAASTLRTMRKGA

SEQ ID NO: 7005 - protein, 101 aa, Helicobacter pylori
  misc_feature (B) LOCATION 1...101
  hypothetical: YES
DEKVMQAALKSGAKGIKVRVSDRLAGAEIARTEWYMEGRVPLHTLRAKIDYGFAEAMTVYGIIGVKVWIFKGEVLQKGIQFEKKEEAKEEREPRRSRRGRQ

SEQ ID NO: 7006 - protein, 100 aa, Helicobacter pylori
  misc_feature (B) LOCATION 1...100
  hypothetical: YES
EKVMQAALKSGAKGIKVRVSDRLAGAEIARTEWYMEGRVPLHTLRAKIDYGFAEAMTVYGIIGVKVWIFKGEVLQKGIQFEKKEEAKEEREPRRSRRGRQ

SEQ ID NO: 7007 - protein, 234 aa, Helicobacter pylori
  misc_feature (B) LOCATION 1...234
  hypothetical: YES
MGQKVNPVGLRLGINRNWTSRWFPSTRTAPSNIDEDNKIRKFLKKELYYAGVSEIVIERAAKKLRVTVVAARPGLIIGKKGVDIEKVKEGLKTLIKKEVSINIKEVKRPQADAQLAAENVATQLEKRVAFRRAMKKVMQAALKSGAKGIKVRVSGRLAGAEIARTEWYMEGRVPLHTLRAKIDYGFAEAMTVYGIIGVKVWIFKGEVLQKGIQFEKKEEAKEEREPRRSRRGRQ

SEQ ID NO: 7008 - protein, 141 aa, Helicobacter pylori
  misc_feature (B) LOCATION 1...141
  hypothetical: YES
MLMPKRTKYRKQMKGRNRGKAHRGNSIAFGDIAIKAIEHGRIDSRQIESARVAMTRHIKRAGKVWIRVFPDKPLTAKPLETRMGKGKGSVEKWVMNIKPGRIVYEMLGIEEGLAREALALSQSKLPFKTKIVTCESENEIY

SEQ ID NO: 7009 - protein, 56 aa, Helicobacter pylori
  misc_feature (B) LOCATION 1...56
  hypothetical: YES
KMADIMDIKSILYTEKSLGLQEKGVLVVQTAQNVTKNQLKEVLKLTLALNPLKSIL

SEQ ID NO: 7010 - protein, 93 aa, Helicobacter pylori
  misc_feature (B) LOCATION 1...93
  hypothetical: YES
MADIMDIKSILYTEKSLGLQEKGVLVVQTAQNVTKNQLKEVFKTYFGFEPLKINSLKQEGKVKRFRGKLGQRKSFKKFYVKVPEGASIAALGA

SEQ ID NO: 7011 - protein, 69 aa, Helicobacter pylori
  misc_feature (B) LOCATION 1...69
  hypothetical: YES
MIQSFTRLNVADNSGAKEIMCIKVLGGSHKRYASVGSVIVASVKKAIPNGKVKFGLVVKTVVVSTPPGW

SEQ ID NO: 7012 - protein, 93 aa, Helicobacter pylori
  misc_feature (B) LOCATION 1...93
  hypothetical: YES
MSRSIKKGPFIDDHLMKKTLKAKEGKDNRPIKTWSRRSTILPEMIGFTYNVHNGRVFVPVYITENHVGYKLGEFAPTRTFKGHKGSVQKKIGK

SEQ ID NO: 7013 - protein, 162 aa, Helicobacter pylori
  misc_feature (B) LOCATION 1...162
  hypothetical: YES
KFQRALALPPLALYTRNYLIAIITYKPYTPSRHFMSVLDSTDITAKSSVKGLLTKLKATAGRNNNGRITSRHKERGAKKLYRIIDFKRNKYNIEGKVAAIEYDPYRNARIALVVYPDGDKRYILQPSGLKVGDSVIAAEGGLDIKVGLCDEVKKYPHRNGGA

SEQ ID NO: 7014 - protein, 276 aa, Helicobacter pylori
  misc_feature (B) LOCATION 1...276
  hypothetical: YES
MAIKTYKPYTPSRRFMSVLDSKDITAKSSVKGLLTKLKATAGRNNNGRITSRHKERGAKKLYRIIDFKRNKYNIEGKVAAIEYDPYRNARIALVVYPDGDKRYILQPSGLKVGDSVIAAEGGLDIKVGFAMKLKNIPIGTVVHNIEMHPGAGGQLARSAGMSAQIMGRENKYTILRMPSSEMRYILSECMASVGVVGNEDFINVSIGKAGRNRHRGIRPQTRGSAMNPVDHPHGGGEGKTGTSGHPVSPWGTPAKGYKTRKKKASDKLIISRKKHK

SEQ ID NO: 7015 - protein, 122 aa, Helicobacter pylori
  misc_feature (B) LOCATION 1...122
  hypothetical: YES
MSKALLKFVRLSPTKARLIARQIQGMNAELAIASLEFTPNKAARVLSKVVASAVANGSLDAKSALIVSCRVDAGPVLRRSIPRAKGRATAIRKPTSHVFVEVAEGKEMKSSKSHKKNQAEGK

SEQ ID NO: 7016 - protein, 125 aa, Helicobacter pylori
  misc_feature (B) LOCATION 1...125
  hypothetical: YES
GGRMSKALLKFVRLSPTKARLIARQIQGMNAELAIASLEFTPNKAARVLSKVVASAVANGSLDAKSALIVSCRVDAGPVLRRSISRAKGRATAIRKSTSHVLVEVAEGKEMKSSKSHKKNQAEGK

SEQ ID NO: 7017 - protein, 144 aa, Helicobacter pylori
  misc_feature (B) LOCATION 1...144
  hypothetical: YES
MGCYGIGISRLLSVILEQKSDDLDCVWTKNTAPFDVVIVVSNLKDEAQKKLAFEVYERLLQKGVDALLDDRDARFGAKMRDFELIGERLALIVGKQTLESKEFECIKRANLEKQTIKDIGIRRKNFRNVSERIRGGNGKNSDWL

SEQ ID NO: 7018 - protein, 576 aa, Helicobacter pylori
  misc_feature (B) LOCATION 1...576
  hypothetical: YES
MLFSKLFAPTLKEPPKDAVLKSPKHPGKAGYIYQIGSGIYNFLPLAKKVLDKIENVTHKRMQEHGAQNILMSFVVLASLWEKSGRLDKYGKELLVFKDRKDNDFVLSPTLEENITEIAANFIKSYKQLPVHLYQIHTKFRDEIRPRFGLVRAREFIMKDGYSFHEDAESLDKEFLNTQSAYKEILSDLGLDFRIVEADSGAIGGSKSREFVVLTECGEDTIVVCQNCDYAANIEIAKRSKRTEPLMSPSALAKFPTPNTTSAPSVAEFFKTEPYFVLKALVNKVIHKDKETLACFFVRGDDNLEETKALNTLNLLGANALELREANEEDLNKAGLIAGFIGPYGLKKHVCYIIFDEDLKEGDCLIVGANEKDFHAVGVDLKGFENLVYADIVQVKESDCCPNCQGALKYHKSLEVGHIFKLGQSYAKSLKASFLDKNGKERFFEMGCYGIGISRLLSVILEQKSDDLGCVWTKNTAPFDVVIVVSNLKDEAQKKLAFEVYERLLQKGVDALLDDRDARFGAKMRDFELIGERLALIVGKQTLESKEFECIKRANLEKQTIKDIELEEKILEMLASE

SEQ ID NO: 7019 - protein, 577 aa, Helicobacter pylori
  misc_feature (B) LOCATION 1...577
  hypothetical: YES
CMLFSKLFAPTLKEPPKDAVLKSPKHPGNGGHPLQIGSGIYNFLPLAKKVLDKIENVTHKRMQEHGAQNILMSFVVLASLWEKSGRLDKYGKELLVFKDRKDNDFVLSPTLEENITEIAANFIKSYKQLPVHLYQIHTKFRDEIRPRFGLVRAREFIMKDGYSFHEDAESLDKEILNTQSAYKEILSDLGLDFRIVEADSGAIGGSKSREFVVLTECGEDTIVVCQNCDYAANIEIAKRSKRTEPLMSPSALAKFPTPNTTSAPSVAEFFKTEPYFVLKALVNKVIHKDKETLACFFVRGDDNLEETKALNTLNLLGANALELREANEEDLNKAGLIAGFIGPYGLKKHVCYIIFDEDLKEGDCLIVGANEKDFHAVGVDLKGFENLVYADIVQVKESDCCPNCQGALKYHKSLEVGHIFKLGQSYAKSLKASFLDKNGKERFFEMGCYGIGISRLLSVILEQKSDDLGCVWTKNTAPFDVVIVVSNLKDEAQKKLAFEVYERLLQKGVDALLDDRDARFGAKMRDFELIGERLALIVGKQTLESKEFECIKRANLEKQTIKDIELEEKILEMLASE

SEQ ID NO: 7020 - protein, 463 aa, Helicobacter pylori
  misc_feature (B) LOCATION 1...463
  hypothetical: YES
MSLIVTRFAPSPTGYLHIGGLRTAIFNYLFARANQGKFFLRIEDTDLSRNSIEAANAIVEAFKWVGLEHDGEILYQSKRFEIYKEYIQKLLDEDKAYYCYMSKEELDALREEQKARKETPRYDNRYRDFKGTPPKGIEPVVRIKVPQNEVIGFNDGVKGEVKVNTNEIDDFIIARSDGTPTYNFVVTIDDALMGITDVIRGDDHLSNTPKQIVLYKALNFKIPNFFHVPMILNEEGQKLSKRHGATNVMDYQEMGYLKEALVNFLARLGWSYQDKEVFSMQELLEWFNPKDLNSSPSCFSWHKLNWLNAHYLKNQSVQELLKLLKPFSFSDLSHLNPAQLDRLLDALKERSQTLKELALKIDEVLTAPIEYEEKVFKKLNQALVMPLLEKFKLALDKTDFNDESALENAMHQIIEEEKIKAGHFMQPLRLALLGKGGGIGLKEALFILGKAESIKRIEEFLKN

SEQ ID NO: 7021 - protein, 472 aa, Helicobacter pylori
  misc_feature (B) LOCATION 1...472
  hypothetical: YES
EHFIIKVRIMSLIVTRFAPSPTGYLHIGGLRTAIFNYLFARANQGKFFLRIEDTDLSRNSIEAANAIVEAFKWVGLEHDGEILYQSKRFEIYKEYIQKLLDEDKAYYCYMSKEELDALREEQKARKETPRYDNRYRDFKGTPPKGIEPVVRIKVPQNEVIGFNDGVKGEVKVNTNEIDDFIIARSDGTPTYNFVVTIDDALMGITDVIRGDDHLSNTPKQIVLYKALNFKIPNFFHVPMILNEEGQKLSKRHGATNVMDYQEMGYLKEALVNFLARLGWSYQDKEVFSMQELLEWFNPKDLNSSPSCFSWHKLNWLNAHYLKNQSVQELLKLLKPFSFSDLSHLNPAQLDRLLDALKERSQTLKELALKIDEVLTAPIEYEEKVFKKLNQALVMPLLEKFKLALDKTDFNDESALENAMHQIIEEEKIKAGHFMQPLRLALLGKGGGIGLKEALFILGKAESIKRIEEFLKN

SEQ ID NO: 7022 - protein, 414 aa, Helicobacter pylori
  misc_feature (B) LOCATION 1...414
  hypothetical: YES
MAILRANLSPKNKLNATLKGWLPILQSELEDLEEVLKQNALDNPLIKIENKRIKNFSDRFNTKKSSDHLENCATASKSLFETLESQIIPPLFPTETSQKIAMDIISGLNNEGYFEENIEERAKVLGVESEVYEKVRKRFSYLNPAGIGAKDVKEGFLFQLDGRELDNNELYEETRKIILNLEKHHEFSKDFYYEKALKILKSFKNPPAIEFLEKEIEVIPELFILEVDNEMIVRLNDESYPTISLEENRFKDSDYLKEKLKEAKDLIDALNLRKATIYKIGLMLLEYQYDFFKGKELRPLKLLDLANEFNHSVSTISRAISNKYLACERGVFPIKHFFSIALDNSETSNAVIKDYLLELIKNEDKKEPLSDAKILELIEEKFHLKMVRRTITKYRQLLNIASSSERKRLYLMRA

SEQ ID NO: 7023 - protein, 417 aa, Helicobacter pylori
  misc_feature (B) LOCATION 1...417
  hypothetical: YES
GIDMAILRANLSPKNKLNATLKGWLPILQSELEDLEEVLKQNALDNPLIKIENKRIKNFSDRFNTKKSSDHLENCATASKSLFETLESQIIPPLFPTETSQKIAMDIISGLNNEGYFEENIEERAKVLGVESEVYEKVRKRFSYLNPAGIGAKDVKEGFLFQLDGRELDNNELYEETRKIILNLEKHHEFSKDFYYEKALKILKSFKNPPAIEFLEKEIEVIPELFILEVDNEMIVRLNDESYPTISLEENRFKDSDYLKEKLKEAKDLIDALNLRKATIYKIGLMLLEYQYDFFKGKELRPLKLLDLANEFNHSVSTISRAISNKYLACERGVFPIKHFFSIALDNSETSNAVIKDYLLELIKNEDKKEPLSDAKILELIEEKFHLKMVRRTITKYRQLLNIASSSERKRLYLMRA

SEQ ID NO: 7024 - protein, 90 aa, Helicobacter pylori
  misc_feature (B) LOCATION 1...90
  hypothetical: YES
MALNLEKKQEIIKAFATKANDTGSCEVQVALLNERIKLLTEHLKTNPKDHSSRLGLLKLVAQRRNLLKYIKRTDHVRYVVLIEKLGIKDR

SEQ ID NO: 7025 - protein, 93 aa, Helicobacter pylori
  misc_feature (B) LOCATION 1...93
  hypothetical: YES
EVVMALNLEKKQEIIKAFATKANDTGSCEVQVALLNERIKLLTEHLKTNPKDHSSRLGLLKLVAQRRNLLKYIKRTDHVRYVVLIEKLGIKDR

SEQ ID NO: 7026 - protein, 84 aa, Helicobacter pylori
  misc_feature (B) LOCATION 1...84
  hypothetical: YES
FSKVFSANLLPEILLESDFDEGVGVLDVLKQIGFCPSTSQARRDIQGGGVKINQEVVKDESYRFVKGNYVIQLGKKRFMKLNIN

SEQ ID NO: 7027 - protein, 280 aa, Helicobacter pylori
  misc_feature (B) LOCATION 1...280
  hypothetical: YES
GINMEQKISVALKEIKRGANEIIGLVYIEKLVRKFYETNVRFIVKAGFDPTAPDLHLGHTVLIQKLALLQQYGARVKFLIGDFTAMIGDPTGKNETRKPLNREQVLENAKTYKEQIYKILDQKHTEVCFNSAWLDALGAKGMIELCAKFSVARMLERDDFAKRYKENRPISIVEFLYPLLQGYDSVAMGADIELGGNDQKFNLLVGRFLQRAYGLNKEQSIITMPLLEGLDGVQKMSKSLGNYVGITEEPNAMFGKIMSVSDDLMWRYYTLLSAKTLEET

SEQ ID NO: 7028 - protein, 402 aa, Helicobacter pylori
  misc_feature (B) LOCATION 1...402
  hypothetical: YES
MEQKISVALKEIKRGANEIIGLEYIEKLVRKYYETNERFIVKAGFDPTAPDLHLGHTVLIQKLALLQQYGARVKFLIGDFTAMIGDPTGKNETRKPLNREQVLENAKTYKEQIYKILDQKHTEVCFNSAWLDALGAKGMIELCAKFSVARMLERDDFAKRYKENRPISIVEFLYPLLQGYDSVAMGADIELGGNDQKFNLLVGRFLQRAYGLNKEQSIITMPLLEGLDGVQKMSKSLGNYVGITEEPNAMFGKIMSVSDDLMWRYYTLLSAKTLEEIEDLKHGILHQTLHPKAVKEDLASEIVARYYDNDQAFKAKEQFSKVFSANLLPEILLESDFDEGVGVLDVLKQIGFCPSTSQARRDIQGGGVKINQEVVKDESYRFVKGNYVIQLGKKRFMKLNIN

SEQ ID NO: 7029 - protein, 402 aa, Helicobacter pylori; identical to SEQ ID NO: 7028
  misc_feature (B) LOCATION 1...402
  hypothetical: YES

SEQ ID NO: 7030 - protein, 219 aa, Helicobacter pylori
  misc_feature (B) LOCATION 1...219
  hypothetical: YES
KALKIWAKLTEEIENKVFSLKEDAILEYQEMSLWTRGLRYLGFKTNVLNFLTPNRQWQCKELEHFSVWSSNALEIKQVLLNDCCYPKYGDEIIAIVTDLKDPKAIAHHKFCKKAIAEVDAKVPMVYIEWHKRDRTIYKMMFYLGEKKSVLASLLTFLNRNECNIVGVSYLGYKDKYSSHCEVSFEIATDKADWMRALINRKYQDRIVELSSLDDAYELQ

SEQ ID NO: 7031 - protein, 527 aa, Helicobacter pylori
  misc_feature (B) LOCATION 1...527
  hypothetical: YES
MNEIDKSVDIGFLRILDVIKKVKTPKGGIEVLRTLIDFTPKIENALNLATKSHKGQYRKSGEPYIVHPICVASVVAFCGGDEAMVCAALLHDVVEDTPCEIETIEREFGQDVANLVDALTKITEIRKEELGVSSQDPRMVVSALTFRKILISAIQDPRALVVKISDRLHNMLTLDALPHDKQVRISKETLAVYAPIASRLGMSSIKNELEDKSFYYIYPEEYKNIKEYLHKNKQSLLLKLNAFASKLEKKLFDSGFSHSDFKLVTRVKRPYSIYLKMQRKGAVNIDEILDLLAIRILLKNPIDCYKVLGIIHLNFKPIVSRFKDYIALPKENGYKTIHTTIFDESSVYEVQIRTFDMHMGAEYGNSAHWKYKAGGVDHEEHHEGMRWLQNFKYHDSDLKNDPKEFYELAKNDLYREDIVVFSPHGDTYTLPVGAIALDFAYMVHSDLGDKATDAYINSKKALLNQELRSGDVVKIIKGDKVIPRFIWMDQLKTSKAKNHLRIQRRNRLKEIDTKSMINILATFFWAL

SEQ ID NO: 7032 - protein, 567 aa, Helicobacter pylori
  misc_feature (B) LOCATION 1...567
  hypothetical: YES
MNEIDKSVDIGFLRILDVIKKVKTPKGGIEVLRTLIDFTPKIENALNLATKSHKGQYRKSGEPYIVHPICVASVVAFCGGDEAMVCAALLHDVVEDTPCEIETIEREFGQDVANLVDALTKITEIRKEELGVSSQDPRMVVSALTFRKILISAIQDPRALVVKISDRLHNMLTLDALPHDKQVRISKETLAVYAPIASRLGMSSIKNELEDKSFYYIYPEEYKNIKEYLHKNKQSLLLKLNAFASKLEKKLFDSGFSHSDFKLVTRVKRPYSIYLKMQRKGAVNIDEILDLLAIRILLKNPIDCYKVLGIIHLNFKPIVSRFKDYIALPKENGYKTIHTTIFDESSVYEVQIRTFDMHMGAEYGNSAHWKYKAGGVDHEEHHEGMRWLQNFKYHDSDLKNDPKEFYELAKNDLYREDIVVFSPHGDTYTLPVGAIALDFAYMVHSDLGDKATDAYINSKKALLNQELRSGDVVKIIKGDKVIPRFIWMDQLKTSKAKNHLRIQRRNRLKEIDTKSMINILATFFGRSVFEDADLKDYKNFEEKLTDCGVETTLTEAMKSFENLGQTH

SEQ ID NO: 7033 - protein, 567 aa, Helicobacter pylori; identical to SEQ ID NO: 7032
  misc_feature (B) LOCATION 1...567
  hypothetical: YES

SEQ ID NO: 7034 - protein, 567 aa, Helicobacter pylori
  misc_feature (B) LOCATION 1...567
  hypothetical: YES
MNEIDKSVDIGFLRILDVIKKVKTPKGGIEVLRTLIDFTPKIENALNLATKSHKGQYRKSGEPYIVHPICVASVVAFCGGDEAMVCAALLHDVVEDTPCEIETIEREFGQDVANLVDALTKITEIRKEELGVSSQDPRMVVSALTFRKILISAIQDPRALVVKISDRLHNMLTLDALPHDKQVRISKETLAVYAPIASRLGMSSIKNELEDKSFYYIYPEEYKNIKEYLHKNKQSLLLKLNAFASKLEKKLFDSGFSHSDFKLVTRVKRPYSIYLKMQRKGAVNIDEILDLLAIRILLKNPIDCYKVLGIIHLNFKPIVSRFKDYIALPKENGYKTIHTTIFDESSVYEVQIRTFDMHMGAEYGNSAHWKYKAGGVDHEEHHEGMRWLQNFKYHDSDLKNDPKEFYELAKNDLYREDIVVFSPHGDTYTLPVGAIALDFAYMVHSDLGDKATDAYINSKKALLNQELRSGDVVKIIKGDKVIPRFIWMDQLKTSKAKNHLRIQRRNRLKEIDTKSMINILSTFFGRSVFEDADLKDYKNFEEKLTDCGVETTLTEAMKSFENLGQTH

SEQ ID NO: 7035 - protein, 776 aa, Helicobacter pylori
  misc_feature (B) LOCATION 1...776
  hypothetical: YES
MNEIDKSVDIGFLRILDVIKKVKTPKGGIEVLRTLIDFTPKIENALNLATKSHKGQYRKSGEPYIVHPICVASVVAFCGGDEAMVCAALLHDVVEDTPCEIETIEREFGQDVANLVDALTKITEIRKEELGVSSQDPRMVVSALTFRKILISAIQDPRALVVKISDRLHNMLTLDALPHDKQVRISKETLAVYAPIASRLGMSSIKNELEDKSFYYIYPEEYKNIKEYLHKNKQSLLLKLNAFASKLEKKLFDSGFSHSDFKLVTRVKRPYSIYLKMQRKGAVNIDEILDLLAIRILLKNPIDCYKVLGIIHLNFKPIVSRFKDYIALPKENGYKTIHTTIFDESSVYEVQIRTFDMHMGAEYGNSAHWKYKAGGVDHEEHHEGMRWLQNFKYHDSDLKNDPKEFYELAKNDLYREDIVVFSPHGDTYTLPVGAIALDFAYMVHSDLGDKATDAYINSKKALLNQELRSGDVVKIIKGDKVIPRFIWMDQLKTSKAKNHLRIQRRNRLKEIDTKSMINILATFFGRSVFEDADLKDYKNFEEKLTDCGVETTLTEAMKSFENLAKLTEEIENKVFSLKEDAILEYQEMSLWTRGLRYLGFKTNVLNFLTPNRQWQCKELEHFSVCSSNALEIKQVLLNDCCYPKYGDEIIAIVTDLKDPKAIAHHKFCKKAIAEVDAKVPMVYIEWHKRDRTIYKMMFYLGEKKSVLASLLTFLNRNECNIVGVSYLGYKDKYSSHCEVSFEIATDKADWMRALINRKYQDRIVELSSLDDAYELQ

SEQ ID NO: 7036 - protein, 155 aa, Helicobacter pylori
  misc_feature (B) LOCATION 1...155
  hypothetical: YES
MRRRKAPVREVLGDPVYGNKVVTKFINKMMFDGKKSVAEKIIYKAFNKIEEKSGEKGIEVFEKALERVRPLVEVRSRRVGGATYQVPVEVRASRQQSLSIRWILEATRKRNERMMVDRLANELMDAASDKGAAFKKKEDVHKMAEANKAFAHYRW

SEQ ID NO: 7037 - protein, 163 aa, Helicobacter pylori
  misc_feature (B) LOCATION 1...163
  hypothetical: YES
SNRQESNRQQEKLRGKQKHEKKKSTLRGFGRSFLWEQSVTKFINKMMFDGKKSVAEKIIYKAFNKIEEKSGEKGIEVFEKALERVRPLVEVRSRRVGGATYQVPVEVRASRQQSLSIRWILEATRKRNERMMVDRLANELMDAASDKGAAFKKKKMCVKWQKR

SEQ ID NO: 7038 - protein, 172 aa, Helicobacter pylori
  misc_feature (B) LOCATION 1...172
  hypothetical: YES
NVENQIKQRLKANPVPINIPIGAEDTFIGVIDLVQMKAIVWNNETMGAKYDVEEIPSDLLEKAKQYREKLVEAVAEQDEALMEKYLNGEELDIEEIKKGIKTGCLNMSFVPMLCGSSFKNKGVQTLLDAVIDYLPAPTEVVDIKGIDPKTEEEVFVKSTMVRPHAPIRSISV

SEQ ID NO: 7039 - protein, 171 aa, Helicobacter pylori
  misc_feature (B) LOCATION 1...171
  hypothetical: YES
VENQIKQRLKANPVPINIPIGAEDTFIGVIDLVQMKAIVWNNETMGAKYDVEEIPSDLLEKAKQYREKLVEAVAEQDEALMEKYLNGEELDIEEIKKGIKTGCLNMSFVPMLCGSSFKNKGVQTLLDAVIDYLPAPTEVVDIKGIDPKTEEEVFVKSTMVRPHAPIRSISV

SEQ ID NO: 7040 - protein, 332 aa, Helicobacter pylori
  misc_feature (B) LOCATION 1...332
  hypothetical: YES
NKRKNIKEVYAGEICAFVGLKDTLTGDTLCDEKNAVVLERMEFPEPVIHIAVEPKTKADQEKMGVALGKLAEEDPSFRVMTQEETGQTLIGGMGELHLEIIVDRLKREFKVEAEIGQPQVAFRETIRSSVSKEHKYAKQSGGRGQYGHVFIKLEPKEPGSGYEFVNEISGGVIPKEYIPAVDKGIQEAMQNGVLAGYPVVDFKVTLYDGSYHDVDSSEMAFKIAGSMAFKEASRAANPVLLEPMMKVEVEVPEEYMGDVIGDLNRRRGQINSMDDRLGLKIVNAFVPLVEMFGYSTDLRSATQGRGTYSMEFDHYGEVPSNIAKEIVEKRKG

SEQ ID NO: 7041 - protein, 331 aa, Helicobacter pylori
  misc_feature (B) LOCATION 1...331
  hypothetical: YES
KRKNIKEVYAGEICAFVGLKDTLTGDTLCDEKNAVVLERMEFPEPVIHIAVEPKTKADQEKMGVALGKLAEEDPSFRVMTQEETGQTLIGGMGELHLEIIVDRLKREFKVEAEIGQPQVAFRETIRSSVSKEHKYAKQSGGRGQYGHVFIKLEPKEPGSGYEFVNEISGGVIPKEYIPAVDKGIQEAMQNGVLAGYPVVDFKVTLYDGSYHDVDSSEMAFKIAGSMAFKEASRAANPVLLEPMMKVEVEVPEEYMGDVIGDLNRRRGQINSMDDRLGLKIVNAFVPLVEMFGYSTDLRSATQGRGTYSMEFDHYGEVPSNIAKEIVEKRKG

SEQ ID NO: 7042 - protein, 673 aa, Helicobacter pylori
  misc_feature (B) LOCATION 1...673
  hypothetical: YES
MSGKTTTSERILFYTGVSHKIGEVHDGAATMDWMEQEKERGITITSAATTCFWKDHQINLIDTPGHVDFTIEVERSMRVLDGAVSVFCSVGGVQPQSETVWRQANKYGVPRIVFVNKMDRIGANFYNVENQIKQRLKANPVPINIPIGAEDTFIGVIDLVQMKAIVWNNETMGAKYDVEEIPSDLLEKAKQYREKLVEAVAEQDEALMEKYLGGEELDIEEIKKGIKTGCLNMSFVPMLCGSSFKNKGVQTLLDAVIDYLPAPTEVVDIKGIDPKTEEEVFVKSSDDGEFAGLAFKIMTDPFVGQLTFVRVYRGKLESGSYVYNSTKDKKERVGRLLKMHSNKREDIKEVYAGEICAFVGLKDTLTGDTLCDEKNAVVLERMEFPEPVIHIAVEPKTKADQEKMGVALGKLAEEDPSFRVMTQEETGQTLIGGMGELHLEIIVDRLKREFKVEAEIGQPQVAFRETIRSSVSKEHKYAKQSGGRGQYGHVFIKLEPKEPGSGYEFVNEISGGVIPKEYIPAVDKGIQEAMQNGVLAGYPVVDFKVTLYDGSYHDVDSSEMAFKIAGSMAFKEASRAANPVLLEPMMKVEVEVPEEYMGDVIGDLNRRRGQINSMDDRLGLKIVNAFVPLVEMFGYSTDLRSATQGRGTYSMEFDHYGEVPSNIAKEIVEKRKG

SEQ ID NO: 7043 - protein, 674 aa, Helicobacter pylori
  misc_feature (B) LOCATION 1...674
  hypothetical: YES
LMSGKTTTSERILFYTGVSHKIGEVHDGAATMDWMEQEKERGITITSAATTCFWKDHQINLIDTPGHVDFTIEVERSMRVLNGAVSVFCSVGGVQPQSETVWRQANKYGVPRIVFVNKMDRIGANFYNVENQIKQRLKANPVPINIPIGAEDTFIGVIDLVQMKAIVWNNETMGAKYDVEEIPSDLLEKVKQYREKLVEAVAEQDEALMEKYLGGEELDIEEINKGIKTGCLNMSFVPMLCGSSFKNKGVQTLLDAVIDYLPAPTEVVDIKGIDPKTEEEVFVKSSDDGEFAGLAFKIMTDPFVGQLTFVRVYRGKLESGSYVYNSTKDKKERVGRLLKMHSNKREDIKEVYAGEICAFVGLKDTLTGDTLCDEKNAVVLERMEFPEPVIHIAVEPKTKADQEKMGVALGKLAEEDPSFRVMTQEETGQTLIGGMGELHLEIIVDRLKREFKVEAEIGQPQVAFRETIRSSVSKEHKYAKQSGGRGQYGHVFIKLEPKEPGSGYEFVNEISGGVIPKEYIPAVDKGIQEAMQNGVLAGYPVVDFKVTLYDGSYHDVDSSEMAFKIAGSMAFKEASRAANPVLLEPMMKVEVEVPEEYMGDVIGDLNRRRGQINSMDDRLGLKIVNAFVPLVEMFGYSTDLRSATQGRGTYSMEFDHYGEVPSNIAKEIVEKRKG

SEQ ID NO: 7044 - protein, 138 aa, Helicobacter pylori
  misc_feature (B) LOCATION 1...138
  hypothetical: YES
NFSIQIQGNGMITPKVLSGFKDRLPKDAIQKAQLLAKVSVVFQSFGFVPIETPHLEYAQTLLPDASSDIQKEIYRFKDHGDRDVALRFDLTVPLARFVSLHHQILGMPFKRYAIGMSLGVKGRKKGVIGNLRNAILIL

SEQ ID NO: 7045 - protein, 342 aa, Helicobacter pylori
  misc_feature (B) LOCATION 1...342
  hypothetical: YES
TLRHRNVFRGERAQKGRYREFTQCDFDFIGSESLVCDAEIIQVIIASLKALDLEDFCVSINHRKILNGICEYFGIAQVNEVLRIVDKLEKIGLNGVEEELKKECDLDSNTIKDLLEMVQIKQNDLSHAEFFEKIAYLKDYNENLKKGIQDLERLYQLLGDLQISQNLYKIDFSIARGLGYYTGIVYETTLNDMKSLGSVCSGGRYDHLTKNFSKENLQGVGASIGIDRLIVALSEMQLLDERSTQAKVLIACMHEEYFSYANRLAESLRQSGIFSEVYPEAQKIKKPFSYANHKGHEFVAVIGEEEFKSETLSLKNMHSGMQLNCLSFLKALEIIGENDEDL

SEQ ID NO: 7046 - protein, 442 aa, Helicobacter pylori
  misc_feature (B) LOCATION 1...442
  hypothetical: YES
MITPKVLSGFKDRLPKDAIQKAQLLAKVSVVFQSFGFVPIETPHLEYAQTLLPDASSDIQKEIYRFKDHGDRDVALRFDLTVPLARFVSLHHQILGMPFKRYAIGNVFRGERAQKGRYREFTQCDFDFIGSESLVCDAEIIQVIIASLKALDLEDFCVSINHRKILNGICEYFGIAQVNEVLRIVDKLEKIGLNGVEEELKKECDLDSNTIKDLLEMVQIKQNDLSHAEFFEKIAYLKDYNENLKKGIQDLERLYQLLGDLQISQNLYKIDFSIARGLGYYTGIVYETTLNDMKSLGSVCSGGRYDHLTKNFSKENLQGVGASIGIDRLIVALSEMQLLDERSTQAKVLIACMHEEYFSYANRLAESLRQSGIFSEVYPEAQKIKKPFSYANHKGHEFVAVIGEEEFKSETLSLKNMHSGMQLNCLSFLKALEIIGENDEDL

SEQ ID NO: 7047 - protein, 100 aa, Helicobacter pylori
  misc_feature (B) LOCATION 1...100
  hypothetical: YES
GFIRLPLKNPNSALRKVAKVRLTSKFEVISYIPGERHNLQEHSIVLVRGGRVKDLPGVKYHIVRGALDTAGVNKRPVSRSKYGTKKPKATDKKATDNKKN

SEQ ID NO: 7048 - protein, 135 aa, Helicobacter pylori
  misc_feature (B) LOCATION 1...135
  hypothetical: YES
VPTINQLIRKERKKVVKKTKSPALVECPQRRGVCTRVYTTTPKKPNSALRKVAKVRLTSKFEVISYIPGEGHNLQEHSIVLVRGGRVKDLPGVKYHIVRGALDTAGVNKRTVSRSKYGTKKAKATDKKATDNKKK

SEQ ID NO: 7049 - protein, 281 aa, Helicobacter pylori
  misc_feature (B) LOCATION 1...281
  hypothetical: YES
LAQELDAEIFSLDSLSIYEDINIASAKPSLKERKNIKHYALDYLNIDEKNNASLFKTLLEDAMRVSSKEILLIVGGSSFYLKSILEGLSGMPKLSDEEVVKIEREIATLSNPYIFLKSIDPNMAFKIHPNDTYRIHKALEIFYATHTPPSEYFKANPKKPFEHAISLFALSVEKNALANNIKQRTKSMLDCGLIEEIKALYIKYPKDSQPFKAIGVKESVLYLEKRLTLKELEEAIISNTMKLAKRQNTFNKTQFNNLYMGSVGEIRHAILKHSKSDTRER

SEQ ID NO: 7050 - protein, 289 aa, Helicobacter pylori
  misc_feature (B) LOCATION 1...289
  hypothetical: YES
RERKPLSIDWPRIGAEIFSLDSLSGCGDINIASAKPSLKERKNIKHYALDYLNIDEKNNASLFKTLLEDAMRVSSKEILLIVGGSSFYLKSILEGLSGMPKLSDEEVVKIEREIATLSNPYIFLKSIDPNMAFKIHPNDTYRIHKALEIFYATHTPPSEYFKANPKKPFEHAISLFALSVEKNALANNIKQRTKSMLDCGLIEEIKALYIKYPKDSQPFKAIGVKESVLYLEKRLTLKELEEAIISNTMKLAKRQNTFNKTQFNNLYMGSVGEVRHAILKHSKSDTRER

SEQ ID NO: 7051 - protein, 63 aa, Helicobacter pylori
  misc_feature (B) LOCATION 1...63
  hypothetical: YES
HLCEKLRARLRAEKKPFQLELVEKDALFLKEVGPYFLISNLPYYIATRLVLNALKALNAGAYW

SEQ ID NO: 7052 - protein, 64 aa, Helicobacter pylori
  misc_feature (B) LOCATION 1...64
  hypothetical: YES
GILEALLMVVAKKSLGQHFLMDESFLDRIVNALPPLNSLRLIEIGVGLGDLTLKLLDRYPLKSL

SEQ ID NO: 7053 - protein, 88 aa, Helicobacter pylori
  misc_feature (B) LOCATION 1...88
  hypothetical: YES
KEKALASLAQAPFFEEALQKGFETLEDFLKACFSSPRKTLSNNLKKSVSYKEKLDKVLDFLALENQPTSVRASEVKDYLKLLKSVLKG

SEQ ID NO: 7054 - protein, 271 aa, Helicobacter pylori
  misc_feature (B) LOCATION 1...271
  hypothetical: YES
MVVAKKSLGQHFLMDESFLDRIVNALPPLNSLRLIEIGVGLGDLTLKLLDRYPLKTYEIDSNLCEKMRARLRAEKKPFQLELVEKDALFLKEEEPYFLISNLPYYIATRLVLNALKDPKCRGLLVMTQKEVALKFCAKDSQNALSVLAHTIGNATLLFDVPPSAFSPPPKVFSSVFEVIKEPLKEKALASLAQAPFFEEALQKGFETLEDFLKACFSSPRKTLSNNLKKSVSYKEKLDKVLDFLALENQPTSVRASEVKDYLKLLKSVLKG

SEQ ID NO: 7055 - protein, 62 aa, Helicobacter pylori
  misc_feature (B) LOCATION 1...62
  hypothetical: YES
GVVSKLALIGCVLNNQAPFKKVITHGFIVDEKAKKMSKSKGNVVSLDNLLKKHGERCGAFVG

SEQ ID NO: 7056 - protein, 81 aa, Helicobacter pylori
  misc_feature (B) LOCATION 1...81
  hypothetical: YES
LSKQSKGLSTFFIQTEQHYKKFRNTLKFLLANFSDMDLKNLERPHDFSPLDHFILEALETISAGVNSAFEEHDLVKGLNIL

SEQ ID NO: 7057 - protein, 80 aa, Helicobacter pylori
  misc_feature (B) LOCATION 1...80
  hypothetical: YES
LSKQSKGLSTFFIQTEQHYKKFRNTLKFLLANFSDMDLKNLERPHDFSPLDHFILEALETISAGVNSAFEEHDLVKGLNI

SEQ ID NO: 7058 - protein, 121 aa, Helicobacter pylori
  misc_feature (B) LOCATION 1...121
  hypothetical: YES
FRGISVLEKLHLKEFKKPENFEAVLALRSAFNEELDRLKKEGVVKNSLECAIEVKEKALCENLVEELLMVSFVGVAKEKLSETPAFTLFKAPFYKCPRCWRFKSELENTPCKRCEEVLKER

SEQ ID NO: 7059 - protein, 134 aa, Helicobacter pylori
  misc_feature (B) LOCATION 1...134
  hypothetical: YES
MKEYKDTLNLNETTFSMKGNLSVNEPKTYAKWQEQQAFKRMQNRKDNHGDFTLHDGPPYANGHLHLGHALNKILKDIVIKREYFKGKKIYYTPGWDCHGLPIEQQILEQLEKEKTSLENPTLFRENAENMRRSF

SEQ ID NO: 7060 - protein, 159 aa, Helicobacter pylori
  misc_feature (B) LOCATION 1...159
  hypothetical: YES
KMCREKTRTFISLLKQKNNKAKDNIMKEYKDTLNLNETTFSMKGNLSVNEPKTYAKWQEQQAFKRMQNRKDNHGDFTLHDGPPYANGHLHLGHALNKILKDIVIKREYFKGKKIYYTPGWDCHGLPIEQQILEQLEKEKTSLENPTLFRENAENMRRSF

SEQ ID NO: 7061 - protein, 409 aa, Helicobacter pylori
  misc_feature (B) LOCATION 1...409
  hypothetical: YES
SIYRALVGVAKKGLLKERHKPIYWSYACESALAEAEVEYKMKKSPSIFVAIDLKKEGLEKLKVKKASLVIWTTTPWTLYANVAIALKKDAVYALTQKGYLVAKALHEKLAALGVVDNAITHEFNSNDLEYLVATNPLNQRDSLVVLGDHVSLEDGTGAVHTAPGHGEEDYYLGLKYHLEVLMSVDEKGCYDEGIIHNQLLDKSYLGEHIFKAQKRIIEQLGDSLLLEREIEHSYPHCWRTHKPVIYRATTQWFILMDEPFIQNDGSQKTLREVALDAIEKVEFVPSSGKNRLKTMIENRPDWCLSRQRKWGVPLAFFIDKRTNKPCFESEVLEHVANLFEEKGCDVWWEYNIKDLLPPSYQDNAKHYEKVMHILDVWFDSGSTFKAVLEDYHGEKGQSQRCGFRRERSA

SEQ ID NO: 7062 - protein, 411 aa, Helicobacter pylori
  misc_feature (B) LOCATION 1...411
  hypothetical: YES
EVSIYRALVGVAKKGLLKERHKPIYWSYACESALAEAEVEYKMKKSPSIFVAIDLKKEGLEKLKVKKASLVIWTTTPWTLYANVAIALKKDAVYALTQKGYLVAKALHEKLAALGVVDNAITHEFNSNDLEYLVATNPLNQRDSLVVLGDHVSLEDGTGAVHTAPGHGEEDYYLGLKYHLEVLMSVDEKGCYDEGIIHNQLLDKSYLGEHIFKAQKRIIEQLGDSLLLEREIEHSYPHCWRTHKPVIYRATTQWFILMDEPFIQNDGSQKTLREVALDAIEKVEFVPSSGKNRLKTMIENRPDWCLSRQRKWGVPLAFFIDKRTNKPCFESEVLEHVANLFEEKGCDVWWEYNIKDLLPPSYQDNAKHYEKVMHILDVWFDSGSTFKAVLEDYHGEKGQSQRCGFRRERSA

SEQ ID NO: 7063 - protein, 614 aa, Helicobacter pylori
  misc_feature (B) LOCATION 1...614
  hypothetical: YES
MKEYKDTLNLNETTFSMKGNLSVNEPKTYAKWQEQQAFKRMQNRKDNHGDFTLHDGPPYANGHLHLGHALNKILKDIVIKREYFKGKKIYYTPGWDCHGLPIEQQILEQLEKEKTSLENPTLFREKCRDHAKKFLEIQKNEFLQLGVLGDFEDPYKTMDFKFEASIYRALVGVAKKGLLKERHKPIYWSYACESALAEAEVEYKMKKSPSIFVAFDLKKEGLEKLKVKKASLVIWTTTPWTLYANVAIALKKDAVYALTQKGYLVAKALHEKLAALGVVDNAITHEFNSNDLEYLVATNPLNQRDSLVVLGDHVSLEDGTGAVHTAPGHGEEDYYLGLKYHLEVLMSVDEKGCYDEGIIHNQLLDKSYLGEHIFKAQKRIIEQLGDSLLLEREIEHSYPHCWRTHKPVIYRATTQWFILMDEPFIQNDGSQKTLREVALDAIEKVEFVPSSGKNRLKTMIENRPDWCLSRQRKWGVPLAFFIDKRTNKPCFESEVLEHVANLFEEKGCDVWWEYNIKDLLPPSYQDNAKHYEKVMHILDVWFDSGSTFKAVLEDYHGEKGQSPSDVVLEGSDQHRGWFQSSLLIGCVLNNQAPFKKVITHGFIVDEKGEKNEQI

SEQ ID NO: 7064 - protein, 944 aa, Helicobacter pylori
  misc_feature (B) LOCATION 1...944
  hypothetical: YES
MCREKTRTFISLLKQKNNKAKDNIMKEYKDTLNLNETTFSMKGNLSVNEPKTYAKWQEQQAFKRMQNRKDNHGDFTLHDGPPYANGHLHLGHALNKILKDIVIKREYFKGKKIYYTPGWDCHGLPIEQQILEQLEKEKTSLENPTLFREKCRDHAKKFLEIQKNEFLQLGVLGDFEDPYKTMDFKFEASIYRALVGVAKKGLLKERHKPIYWSYACESALAEAEVEYKMKKSPSIFVAFDLKKEGLEKLKVKKASLVIWTTTPWTLYANVAIALKKDAVYALTQKGYLVAKALHEKLAALGVVDNAITHEFNSNDLEYLVATNPLNQRDSLVVLGDHVSLEDGTGAVHTAPGHGEEDYYLGLKYHLEVLMSVDEKGCYDEGIIHNQLLDKSYLGEHIFKAQKRIIEQLGDSLLLEREIEHSYPHCWRTHKPVIYRATTQWFILMDEPFIQNDGSQKTLREVALDAIEKVEFVPSSGKNRLKTMIENRPDWCLSRQRKWGVPLAFFIDKRTNKPCFESEVLEHVANLFEEKGCDVWWEYNIKDLLPPSYQDNAKHYEKVMHILDVWFDSGSTFKAVLEDYHGEKGQSPSDVVLEGSDQHRGWFQSSLLIGCVLNNQAPFKKVITHGFIVDEKGEKMSKSKGNVVSLDNLLKKHGSDVVRLWVAFNDYQNDLRVSQTFFIQTEQHYKKFRNTLKFLLANFSDMDLKNLERPHDFSPLDHFILEALETISAGVNSAFEEHDLVKGLNILMAFVTNELSGIYLDACKDSLYCDSKNNEKRQAIQMVLLAVASQLCYFLAPILTHTIEEVLEHSQVLRAFLQAKDVFDLKGISVLEKLHLKEFKKPENFEAVLALRSAFNEELDRLKKEGVVKNSLECAIEVKEKALCENLVEELLMVSFVGVAKEKLSETPAFTLFKAPFYKCPRCWRFKSELENTPCKRCEEVLKER

SEQ ID NO: 7065 - protein, 55 aa, Helicobacter pylori
  misc_feature (B) LOCATION 1...55
  hypothetical: YES
VSESEKQEIENKIEERKRAKEQKDFLKADSIREELLQQKIALMDTPQGTIWEKLF

SEQ ID NO: 7066 - protein, 104 aa, Helicobacter pylori
  misc_feature (B) LOCATION 1...104
  hypothetical: YES
KAMLSSTNDIRYQNPKNKALKGEILANLKFIKKLLGIGCKDPSAYVQLGVSKSEKQEIENKIEERKRAKEQKDFLKADSIREELLQQKIALMDTPQGTIWEKLF

SEQ ID NO: 7067 - protein, 369 aa, Helicobacter pylori
  misc_feature (B) LOCATION 1...369
  hypothetical: YES
MFIYDTKLKQKVPFEPLVHNKANIYVCGPTVYDDAHLGHARSAIAFDLLRRTLELSGYEVVLVRNFTDIDDKIINKAFKENKSIQELSSIYIESYTRDLNALNVKQPSLEPKASEYLDAMVRMIETLLEKNFAYRVSNGDIYLDTSKDKDYGSLSMHNSSVEFSRIGLVQEKRLEQDFVLWKSYKGDNDVGFDSPLGKGRPGWHIECSSMVFETLALANAPYQIDIHAGGTDLLFPHHENEACQTRCAFGVEIAKYWMHNGFVNINNEKMSKSLGNSFFIKDALKNYDGEILRNYLLGVHYRSVLNFNEEDLLMSKKRLDKIYRLKQRVLGTLGGINPNFKKEILECMQDDLNVSKALSVLESHAFFYE

SEQ ID NO: 7068 - protein, 408 aa, Helicobacter pylori
  misc_feature (B) LOCATION 1...408
  hypothetical: YES
MFIYDTKLKQKVPFEPLVHNKANIYVCGPTVYDDAHLGHARSAIAFDLLRRTLELSGYEVVLVRNFTDIDDKIINKAFKENKSIQELSSIYIESYTRDLNALNVKQPSLEPKASEYLDAMVRMIETLLEKNFAYRVSNGDIYLDTSKDKDYGSLSMHNSSVEFSRIGLVQEKRLEQDFVLWKSYKGDNDVGFDSPLGKGRPGWHIECSSMVFETLALANAPYQIDIHAGGTDLLFPHHENEACQTRCAFGVEIAKYWMHNGFVNINNEKMSKSLGNSFFIKDALKNYDGEILRNYLLGVHYRSVLNFNEEDLLMSKKRLDKIYRLKQRVLGTLGGINPNFKKEILECMQDDLNVSKALSVLESMLSSTNEKLDQNPKNKALKGEILANLKFIEELLGIGFKDLARISN

SEQ ID NO: 7069 - protein, 465 aa, Helicobacter pylori
  misc_feature (B) LOCATION 1...465
  hypothetical: YES
MFIYDTKLKQKVPFEPLVHNKANIYVCGPTVYDDAHLGHARSAIAFDLLRRTLELSGYEVVLVRNFTDIDDKIINKAFKENKSIQELSSIYIESYTRDLNALNVKQPSLEPKASEYLDAMVRMIETLLEKNFAYRVSNGDIYLDTSKDKDYGSLSMHNSSVEFSRIGLVQEKRLEQDFVLWKSYKGDNDVGFDSPLGKGRPGWHIECSSMVFETLALANAPYQIDIHAGGTDLLFPHHENEACQTRCAFGVEIAKYWMHNGFVNINNEKMSKSLGNSFFIKDALKNYDGEILRNYLLGVHYRSVLNFNEEDLLMSKKRLDKIYRLKQRVLGTLGGINPNFKKEILECMQDDLNVSKALSVLESMLSSTNEKLDQNPKNKALKGEILANLKFIEELLGIGFKDPSAYFQLGVSESEKQEIENKIEERKRAKEQKDFLKADSIREELLQQKIALMDTPQGTIWEKLF

SEQ ID NO: 7070 - protein, 164 aa, Helicobacter pylori
  misc_feature (B) LOCATION 1...164
  hypothetical: YES
MNKEPMSMHGYNKICAELKQLKEVERPNIVKEIDIARGHGDLKENAEYHAAKEKQRFIEARIVDLSEIVANAQVIDPSALAHNKVSFGSTIKILNLDNDKEFSYTIVGSVESDPAKGLISFGSPIAKSLIGKSKGDAVSIQLPNGESDFEILDIYYKEICFDEN

SEQ ID NO: 7071 - protein, 164 aa, Helicobacter pylori; identical to SEQ ID NO: 7070
  misc_feature (B) LOCATION 1...164
  hypothetical: YES

SEQ ID NO: 7072 - protein, 193 aa, Helicobacter pylori
  misc_feature (B) LOCATION 1...193
  hypothetical: YES
PAQQQPFCHYPGRNDLKMRSLSVGLTHEGFDGYAIGGLAVGESVDEMLETIAHTAPLLPKDKPRYLMGVGTPENILDAISLGVDMFDCVMPTRNARNATLFTHSGKISIKNAPYKLDDTPIEENCACYACKRYSKAYLHHLFRAKELTYARLASLHNLHFYLELVKNARNAILEKRFLSFKKEFLEKYHSCSH

SEQ ID NO: 7073 - protein, 194 aa, Helicobacter pylori
  misc_feature (B) LOCATION 1...194
  hypothetical: YES
TMDFQLQAVDDNARAGVLNLAHSQVETPVFMPVGTQGCIKSLDAMDAQEILGAKLILANTYHMYLRPGEKVVEQLGGLHRFAQFQGSFLTDSGGFQAFSLSDNVKLQEDGIVFKSHIDGSKHLFTPIKVLDIQYSLNSDIMMVLDDLVGLPAPLKRLEESIKRSAKWANMSLEYHKENNRPNNNLFAIIQGGTI

SEQ ID NO: 7074 - protein, 371 aa, Helicobacter pylori
  misc_feature (B) LOCATION 1...371
  hypothetical: YES
MDFQLQAVDDNARAGVLNLAHSQVETPVFMPVGTQGCIKSLDAMDAQEILGAKLILANTYHMYLRPGEKVVEQLGGLHRFAQFQGSFLTDSGGFQAFSLSDNVKLQEDGIVFKSHIDGSKHLFTPIKVLDIQYSLNSDIMMVLDDLVGLPAPLKRLEESIKRSAKWANMSLEYHKENNRPNNNLFAIIQGGTHLKMRSLSVGLTHEGFDGYAIGGLAVGESVDEMLETIAHTAPLLPKDKPRYLMGVGTPENILDAISLGVDMFDCVMPTRNARNATLFTHSGKISIKNAPYKLDDTPIEENCACYACKRYSKAYLHHLFRAKELTYARLASLHNLHFYLELVKNARNAILEKRFLSFKKEFLEKYHSCSH

SEQ ID NO: 7075 - protein, 88 aa, Helicobacter pylori
  misc_feature (B) LOCATION 1...88
  hypothetical: YES
MAHKKGQGSTQNNRDSAGRRLGVKKFGSEFVRAGNIIVRQRGTKIHPGNNVGMGKDHTLYALIDGVVKFEHKDRSRKKVSVISGNFGE

SEQ ID NO: 7076 - protein, 89 aa, Helicobacter pylori
  misc_feature (B) LOCATION 1...89
  hypothetical: YES
TMAHKKGQGSTQNNRDSAGRRLGVKKFGSEFVRAGNIIVRQRGTKIHPGNNVGMGKDHTLYALIDGVVKFEHKDRSRKKVSVISGNFGE

SEQ ID NO: 7077 - protein, 541 aa, Helicobacter pylori
  misc_feature (B) LOCATION 1...541
  hypothetical: YES
MHTLIKGVLEEILEAEVIIEYPKDREHGHYATPIAFNLAKVFKKSPLAIAEELALKIGSHEKTQGFFDRVVACKGYINFTLSLDFLERFTQKALELKEQFGSQVKSERSQKIFLEFVSANPTGPLHIGHARGAVFGDSLAKIARFLGHEVLCEYYVNDMGSQIRLLGVSVWLAYKEHVLKESVTYPEVFYKGEYIIEIAKKAHNDLEPSLFKENEETIIEVLSDYAKDLMLLEIKGNLDALDIHFDSYASEKEVFKHKDAVFDRLEKANALYEKDSKTWLKSSLYQDESDRVLIKEDKSYTYLAGDIVYHDEKFQQNYTKYINIWGADHHGYIARVKASLEFLGYDSSKLEVLLAQMVRLLKDNEPYKMSKRAGNFILIKDVIDDVGKDALRFIFLSKRLDTHLEFDVNTLKKQDSSNPIYYIHYANSRIHTMLEKSPFSKEEILQTPLKNLNAEEKYLLFSALSLPKAVESSFEEYGLQKMCEYAKTLASEFHRFYNAGKILDTPKAKELLKICLMVSLSLTNAFKLLGIEIKTKISSKD

SEQ ID NO: 7078 - protein, 548 aa, Helicobacter pylori
  misc_feature (B) LOCATION 1...548
  hypothetical: YES
KQTRKLSMHTLIKGVLEEILEAEVIIEYPKDREHGHYATPIAFNLAKVFKKSPLAIAEELALKIGSHEKTQGFFDRVVACKGYINFTLSLDFLERFTQKALELKEQFGSQVKSERSQKIFLEFVSANPTGPLHIGHARGAVFGDSLAKIARFLGHEVLCEYYVNDMGSQIRLLGVSVWLAYKEHVLKESVTYPEVFYKGEYIIEIAKKAHNDLEPSLFKENEETIIEVLSDYAKDLMLLEIKGNLDALDIHFDSYASEKEVFKHKDAVFDRLEKANALYEKDSKTWLKSSLYQDESDRVLIKEDKSYTYLAGDIVYHDEKFQQNYTKYINIWGADHHGYIARVKASLEFLGYDSSKLEVLLAQMVRLLKDNEPYKMSKRAGNFILIKDVIDDVGKDALRFIFLSKRLDTHLEFDVNTLKKQDSSNPIYYIHYANSRIHTMLEKSPFSKEEILQTPLKNLNAEEKYLLFSALSLPKAVESSFEEYGLQKMCEYAKTLASEFHRFYNAGKILDTPKAKELLKICLMVSLSLTNAFKLLGIEIKTKISSKD

SEQ ID NO: 7079 - protein, 104 aa, Helicobacter pylori
  misc_feature (B) LOCATION 1...104
  hypothetical: YES
MSYAIFKHGGKQYKVVEGDIVLLDKMNKEPKALVELVEVLAVSKEGKLSCGKPFVNGAKIEAEVINEGRSKKVITFKKRRRKDSKTKRGFRRDFTRVRITKIVA

SEQ ID NO: 7080 - protein, 107 aa, Helicobacter pylori
  misc_feature (B) LOCATION 1...107
  hypothetical: YES
GIEMSYAIFKHGGKQYKVVEGDIVLLDKMNKEPKALVELVEVLAVSKEGKLSCGKPFVNGAKIEAEVINEGRSKKVITFKKRRRKDSKTKRGFRRDFTRVRITKIVA

SEQ ID NO: 7081 - protein, 158 aa, Helicobacter pylori
  misc_feature (B) LOCATION 1...158
  hypothetical: YES
TIFEGTLYFRIITIMKQEPTTYQPEEIEKKIYEICSHRGYFEINGNEKIQEKGKRFCLMMPPPNVTGILHIGHALTLSLQDILVRYKRMDGYKTLYQPGLDHAGIATQNVVEKQLLSQGVKKEDLGREKFIQKVWEWKEKSGGAILEQMKRLAWRSFF

SEQ ID NO: 7082 - protein, 157 aa, Helicobacter pylori
  misc_feature (B) LOCATION 1...157
  hypothetical: YES
IFEGTLYFRIITIMKQEPTTYQPEEIEKKIYEICSHRGYFEINGNEKIQEKGKRFCLMMPPPNVTGILHIGHALTLSLQDILVRYKRMDGYKTLYQPGLDHAGIATQNVVEKQLLSQGVKKEDLGREKFIQKVWEWKEKSGGAILEQMKRLAWRSFF

SEQ ID NO: 7083 - protein, 306 aa, Helicobacter pylori
  misc_feature (B) LOCATION 1...306
  hypothetical: YES
DIKLSTTHLENNKNFANKLFNAASYLKLKQESFKDKERLNEYQTALGRYAKSRLNLVTKEVRNALDNYRFNDATTLLYRFLWGEFCDWFIEFSKVENEAIDELGSVLKEALKLLHPFMPFISESLYHKLSNTELENAHSIMVMPYPKEIAQDEKLEHEFEVIKDCIVSLRRLKIMLETPPIVLKEASVGLREKIENTERLQNYAQKLAKLEKVSVITYKPLKSVSDVGEFCQTYADLENLDLSPLIARLKKQLEKLEKEKLKLNLHNENFVKNAPKSVLEKARESLKTLLEKEGKIQQELDLLEQP

SEQ ID NO: 7084 - protein, 341 aa, Helicobacter pylori
  misc_feature (B) LOCATION 1...341
  hypothetical: YES
MSKSKGNVIDPLEMIEKYGADSLRFTLANLCATGRDIKLSTTHLENNKNFANKLFNAASYLKLKQESFKDKERLNEYQTALGRYAKSRLNLVTKEVRNALDNYRFNDATTLLYRFLWGEFCDWFIEFSKVENEAIDELGSVLKEALKLLHPFMPFISESLYHKLSNTELENAHSIMVMPYPKEIAQDEKLEHEFEVIKDCIVSLRRLKIMLETPPIVLKEASVGLREKIENTERLQNYAQKLAKLEKVSVITYKPLKSVSDVGEFCQTYADLENLDLSPLIARLKKQLEKLEKEKLKLNLHNENFVKNAPKSVLEKARESLKTLLEKEGKIQQELDLLEQP

SEQ ID NO: 7085 - protein, 345 aa, Helicobacter pylori
  misc_feature (B) LOCATION 1...345
  hypothetical: YES
RGAAFSRTRFTMDKGLQRAVKLAFLKWYEKGLIVQDNYMVNWCTKDGALSDIEVEYEERKEALYYIRYYLENQKDYLVVDTTRPETLFGDSAIMVNPNDERYKHLVGQQVMLPLINRTIPIIADAHVEMGFGTGCVKVTPGHDFNDYEVGKRHHLETIKIFDEKGILNAHCGEFENLERLEARDKVVAALKENALLEKIEEHVHQVGHCYRCHNVVEPYVSKQWFVKPEIAQSSIEKIQQGLARFYPSNWINNYNAWMRELRPWCISRQLFWGHQIPVFTCENNHQFVSLDTPLSCPTCKSEKLEQDKDVLDTWFSSGLWGFSTLGWGQEKSDLFNESELNKFLP

SEQ ID NO: 7086 - protein, 535 aa, Helicobacter pylori
  misc_feature (B) LOCATION 1...535
  hypothetical: YES
MKQEPTTYQPEEIEKKIYEICSHRGYFEINGNEKIQEKGKRFCLMMPPPNVTGILHIGHALTLSLQDILVRYKRMDGYKTLYQPGLDHAGIATQNVVEKQLLSQGVKKEDLGREKFIQKVWEWKEKSGGAILEQMKRLGVSTAFSRTRFTMDKGLQRAVKLAFLKWYEKGLIVQDNYMVNWCTKDGALSDIEVEYEERKGALYYIRYYLENQKDYLVVATTRPETLFGDSAIMVNPNDERYKHLVGQQVILPLINRTIPIIADAHVEMGFGTGCVKVTPGHDFNDYEVGKRHHLETIKIFDEKGILNAHCGEFENLERLEARDKVVAALKENALLEKIEEHVHQVGHCYRCHNVVEPYVSKQWFVKPEIAQSSIEKIQQGLARFYPSNWINNYNAWMRELRPWCISRQLFWGHQIPVFTCENNHQFVSLDTPLSCPTCKSEKLEQDKDVLDTWFSSGLWAFSTLGWGQEKSDLFNESDLKDFYPNTTLITGFDILFFWVARMLFCSESLLGELPFKDIYLHALVRDEKGRKNEQI

SEQ ID NO: 7087 - protein, 872 aa, Helicobacter pylori
  misc_feature (B) LOCATION 1...872
  hypothetical: YES
MKQEPTTYQPEEIEKKIYEICSHRGYFEINGNEKIQEKGKRFCLMMPPPNVTGILHIGHALTLSLQDILVRYKRMDGYKTLYQPGLDHAGIATQNVVEKQLLSQGVKKEDLGREKFIQKVWEWKEKSGGAILEQMKRLGVSTAFSRTRFTMDKGLQRAVKLAFLKWYEKGLIVQDNYMVNWCTKDGALSDIEVEYEERKGALYYIRYYLENQKDYLVVATTRPETLFGDSAIMVNPNDERYKHLVGQQVILPLINRTIPIIADAHVEMGFGTGCVKVTPGHDFNDYEVGKRHHLETIKIFDEKGILNAHCGEFENLERLEARDKVVAALKENALLEKIEEHVHQVGHCYRCHNVVEPYVSKQWFVKPEIAQSSIEKIQQGLARFYPSNWINNYNAWMRELRPWCISRQLFWGHQIPVFTCENNHQFVSLDTPLSCPTCKSEKLEQDKDVLDTWFSSGLWAFSTLGWGQEKSDLFNESDLKDFYPNTTLITGFDILFFWVARMLFCSESLLGELPFKDIYLHALVRDEKGEKMSKSKGNVIDPLEMIEKYGADSLRFTLANLCATGRDIKLSTTHLENNKNFANKLFNAASYLKLKQESFKDKERLNEYQTALGRYAKSRLNLVTKEVRNALDNYRFNDATTLLYRFLWGEFCDWFIEFSKVENEAIDELGSVLKEALKLLHPFMPFISESLYHKLSNTELENAHSIMVMPYPKEIAQDEKLEHEFEVIKDCIVSLRRLKIMLETPPIVLKEASVGLREKIENTERLQNYAQKLAKLEKVSVITYKPLKSVSDVGEFCQTYADLENLDLSPLIARLKKQLEKLEKEKLKLNLHNENFVKNAPKSVLEKARESLKTLLEKEGKIQQELDLLEQP

SEQ ID NO: 7088 - protein, 64 aa, Helicobacter pylori
  misc_feature (B) LOCATION 1...64
  hypothetical: YES
VKFSVLTLFPQLILPYFEDSILKRALEKNLFELEVLNLRDFSANKYQKAXSHAHWWGCGANFRP

SEQ ID NO: 7089 - protein, 229 aa, Helicobacter pylori
  misc_feature (B) LOCATION 1...229
  hypothetical: YES
VKFSVLTLFPQLILPYFEDSILKRALEKNLFELEVLNLRDFSANKYQKADHTLIGGGAGQILDPEMIENALHSVKNPKHTIFLSAVGKPFKQIDAMRLAQKKHVVLVCGRYEGFDERSIELGADEVFCIGDFILTGGELGALCLIDSIARHIQGVLGNAQSLENESFENNYLETPNFANAVFKSKEINKIPAPLEYSKGNHAKIKQLKLDLSKLRTKFYRLDLFKQHKS

SEQ ID NO: 7090 - protein, 229 aa, Helicobacter pylori; identical to SEQ ID NO: 7089
  misc_feature (B) LOCATION 1...229
  hypothetical: YES

SEQ ID NO: 7091 - protein, 118 aa, Helicobacter pylori
  misc_feature (B) LOCATION 1...118
  hypothetical: YES
MKNRYIQQFEDAQLKDKSMPTFKAGDTLRLGITIKEGEKTRTQYFEGVCIAIRGNGVDKTFCVRKIGANNIGVEKIFPFYSESLASVEVLRVGRVRRAKLYYLRDRRGKAARIKEVRH

SEQ ID NO: 7092 - protein, 121 aa, Helicobacter pylori
  misc_feature (B) LOCATION 1...121
  hypothetical: YES
GKHMKNRYIQQFEDAQLKDKSMPTFKAGDTLRLGITIKEGEKTRTQYFEGVCIAIRGNGVDKTFCVRKIGANNIGVEKIFPFYSESLASVEVLRVGRVRRAKLYYLRDRRGKAARIKEVRH

SEQ ID NO: 7093 - protein, 76 aa, Helicobacter pylori
  misc_feature (B) LOCATION 1...76
  hypothetical: YES
MTVIRLTRIGRKKKPFYRVVVTDSRKRRDGGWIESIGYYNPLSEPKDVRIDKERLNYWKGVGAKMSERVEKLSQKA

SEQ ID NO: 7094 - protein, 80 aa, Helicobacter pylori
  misc_feature (B) LOCATION 1...80
  hypothetical: YES
EIFVMTVIRLTRIGRKKKPFYRVVVTDSRKRRDGGWIESIGYYNPLSEPKDVRIDKERLNYWKGVGAKMSERVEKLSQKA

SEQ ID NO: 7095 - protein, 101 aa, Helicobacter pylori
  misc_feature (B) LOCATION 1...101
  hypothetical: YES
RVFMLRFAPSPTGDMHIGNLRAAIFNYIVAKQQNKPFLIRIEDTDKERNIEGKDREILEILKLMGISWDKLVYQSHNIDYHREMAEKLLKENKAFCMRARD

SEQ ID NO: 7096 - protein, 309 aa, Helicobacter pylori
  misc_feature (B) LOCATION 1...309
  hypothetical: YES
APVVRLKAPNHAVSFNDAIKKEVKFEPDELDSFVLLRQDKSPTYNFACACDDLLYEISLIIRGEDHVSNTPKQILIQQALGSNDPIVYAHLPIILDETSGKKMSKRDEASSVKWLLNQGFLPEAIANYLITIGNKVPKEVFSLDEAIEWFSLENLSSSPAHFNLKYLKHLNHEHLKLLDDDKLLELTLIKDKNLLGLLRLFIEECGTLLELKEKISLFLEPKDIVKTYENEDFKERCLTLFNALKSMDFQAYKDFESFKKEAMRLSQLKGKDFFKPLRILLTGNSHGVELPLIFPYIQSHHQEVLRLKV

SEQ ID NO: 7097 - protein, 308 aa, Helicobacter pylori
  misc_feature (B) LOCATION 1...308
  hypothetical: YES
PVVRLKAPNHAVSFNDAIKKEVKFEPDELDSFVLLRQDKSPTYNFACACDDLLYEISLIIRGEDHVSNTPKQILIQQALGSNDPIVYAHLPIILDETSGKKMSKRDEASSVKWLLNQGFLPEAIANYLITIGNKVPKEVFSLDEAIEWFSLENLSSSPAHFNLKYLKHLNHEHLKLLDDDKLLELTLIKDKNLLGLLRLFIEECGTLLELKEKISLFLEPKDIVKTYENEDFKERCLTLFNALKSMDFQAYKDFESFKKEAMRLSQLKGKDFFKPLRILLTGNSHGVELPLIFPYIQSHHQEVLRLKV

SEQ ID NO: 7098 - protein, 439 aa, Helicobacter pylori
  misc_feature (B) LOCATION 1...439
  hypothetical: YES
MLRFAPSPTGDMHIGNLRAAIFNYIVAKQQNKPFLIRIEDTDKERNIEGKDREILEILKLMGISWDKLVYQSHNIDYHREMAEKLLKENKAFYCYASAEFLEREKEKAKNEKRPFRYLDEWATLEKDKNHAPVVRLKAPNHAVSFNDAIKKEVKFEPDELDSFVLLRQDKSPTYNFACACDDLLYEISLIIRGEDHVSNTPKQILIQQALGSNDPIVYAHLPIILDETSGKKMSKRDEASSVKWLLNQGFLPEAIANYLITIGNKVPKEVFSLDEAIEWFSLENLSSSPAHFNLKYLKHLNHEHLKLLDDDKLLELTLIKDKNLLGLLRLFIEECGTLLELKEKISLFLEPKDIVKTYENEDFKERCLTLFNALKSMDFQAYKDFESFKKEAMRLSQLKGKDFFKPLRILLTGNSHGVELPLIFPYIQSHHQEVLRLKA

SEQ ID NO: 7099 - protein, 367 aa, Helicobacter pylori
  misc_feature (B) LOCATION 1...367
  hypothetical: YES
VFELEKELKELFDIYEKSPYELYLVGGCMRDCLMGITPKDYDLTSNALVNESKELLLKHDFRVLETGIKHGTITALKNHQSYEITTFRMEKGHIKHRKPKELVFSARLTDDLKRRDFSMNAIAYSPTKGLIDPFKGQNAIENQTIECVGEARLRFFEDALRILRALRFSATLGFKIAASTKRAVFACKDLLKHLSKERLQSELNKLLMGKNAYEVAKEYQEILELVTQEKIENLGFLKNAPLNLELRLLGFFKHQKSLENLRYPKKTCVLFAQAKECHKAFLNIHSKTELKFLLKDHDLEPFNLALDFYALENPKRALKIKGLLKEIFDSNEPFKKEHLPLRRHASKLGLPAPKNRRNFKRMLKFSH

SEQ ID NO: 7100 - protein, 380 aa, Helicobacter pylori
  misc_feature (B) LOCATION 1...380
  hypothetical: YES
KDIITQRNFKSKSVFELEKELKELFDIYEKSPYELYLVGGCMRDCLMGITPKDYDLTSNALVNESKELLLKHDFRVLETGIKHGTITALKNHQSYEITTFRMEKGHIKHRKPKELVFSARLTDDLKRRDFSMNAIAYSPTKGLIDPFKGQNAIENQTIECVGEARLRFFEDALRILRALRFSATLGFKIAASTKRAVFACKDLLKHLSKERLQSELNKLLMGKNAYEVAKEYQEILELVTQEKIENLGFLKNAPLNLELRLLGFFKHQKSLENLRYPKKTCVLFAQAKECHKAFLNIHSKTELKFLLKDHDLEPFNLALDFYALENPKRALKIKGLLKEIFDSNEPFKKEHLPLRRHASKLGLPAPKNRRNFKRMLKFSH

SEQ ID NO: 7101 - protein, 135 aa, Helicobacter pylori
  misc_feature (B) LOCATION 1...135
  hypothetical: YES
TQQKEIIVSYGELVGGDFNLKDILLSSGARLHLVGNTNRAYLRDYRLALNENSKMLFKTHNPTFKKDTSFKDLQALAKEHGLIDYYNLGDVDLLNRTALEEILALKPSLVSFSADKSFNSAQGALLWGKKNGLKP

SEQ ID NO: 7102 - protein, 232 aa, Helicobacter pylori
  misc_feature (B) LOCATION 1...232
  hypothetical: YES
MKTAKCSFKTHNPTFKKDTSFKDLQALAKEHGLIDYYNLGDVDLLNRTALEEILALKPSLVSFSADKSFNSAQAGIIMGQKEWVETLKNHPLYRALRLGKITLTLLFHSLNAWVNHQEEITIHALLHQTKDALLQKALKLYALLKPLELNVSIASSFSKIGNLPDKELESFCVKVQPKNTRALNCEKLYLKLFQKGVITRISCAFVCFEVFSLNGEDLEKIALVLKEILNKA

SEQ ID NO: 7103 - protein, 98 aa, Helicobacter pylori
  misc_feature (B) LOCATION 1...98
  hypothetical: YES
RKNRCREARKLHIPIVAPLDTNCDPDLVDYPIPGNDDAIRSIRLFCKEMSEAILEGRELMQEEIVHADENSEEIESVSNEEKEEMLAEIQKEITQGAE

SEQ ID NO: 7104 - protein, 198 aa, Helicobacter pylori
  misc_feature (B) LOCATION 1...198
  hypothetical: YES
AWRKRTKITLRRILMVTMKDLLECGVHFGHQTRRWNPKTKKFIFGVRKNIHIIDLQKTLRYFRYTYNIVRDASAQGKSIMFVGTKKQANETLKEFAESIQVPYVNYRWLGGMLTNFSTIRKSVRKLEIIEEMENSGQIDLLTKKEKLMILRKKEKLDKYLGGVRHMKKIPDMIFVIDVAKEKIAVAKRGNSISLSWPP

SEQ ID NO: 7105 - protein, 264 aa, Helicobacter pylori
  misc_feature (B) LOCATION 1...264
  hypothetical: YES
MVTMKDLLECGVHFGHQTRRWNPKTKKFIFGVRKNIHIIDLQKTLRYFRYTYNIVRDASAQGKSIMFVGTKKQANETLKEFAESIQVPYVNYRWLGGMLTNFSTIRKSVRKLEIIEEMENSGQIDLLTKKEKLMILRKKEKLDKYLGGVRHMKKIPDMIFVIDVAKEKIAVAEARKLHIPIVAPLDTNCDPDLVDYPIPGNDDAIRSIRLFCKEMSEAILEGRELMQEEIVHADENSEEIESVSNEEKEEMLAEIQKEITQGAE

SEQ ID NO: 7106 - protein, 264 aa, Helicobacter pylori
  misc_feature (B) LOCATION 1...264
  hypothetical: YES
MVTMKDLLECGVHFGHQTRRWNPKTKKFIFGVRKNIHIIDLQKTLRYFRYTYNIVRDASAQGKSIMFVGTKKQANETLKEFAESIQVPYVNYRWLGGMLTNFSTIRKSVRKLEIIEEMENSGQIDLLTKKEKLMILRKKEKLDKYLGGVRHMKKIPDMIFVIDVAKEKIAVAEARKLHIPIVAPLDTNCDPDLVDYPIPGNDDAIRSIRLFCKEMSEAILEGRELMQEEIVHADENSEEIEFVSNEEKEEMLAEIQKEITQGAE

SEQ ID NO: 7107 - protein, 91 aa, Helicobacter pylori
  misc_feature (B) LOCATION 1...91
  hypothetical: YES
EQGKPEKIWDKIVPGKMERFIADNTLIDQRLTLLGQFYVMDDKKTIAQVIADCSKEWDDNLKITEYVRFELGEGIEKKTENFAEEVALQMK

SEQ ID NO: 7108 - protein, 280 aa, Helicobacter pylori
  misc_feature (B) LOCATION 1...280
  hypothetical: YES
NSKRNHSRSRIMSGISAQLVKKLRDLTDAGMMDCKKALVEVAGDLQKAIDFLREKGLSKAAKKADRIAAEGVVALEVAPDFKSAMMVEINSETDFVAKNEGFKELVKKTLETIKTHNIHTTEELLKSPLDNKPFEEYLHSQIAVIGENILVRKIAHLKAPSSHIINGYAHSNARVGVLIAIEYNNEKNAPKVVELARNIAMHAAAMKPQVLDCKDFSLDFVKKETLALIAEIEKDNEEAKRLGKPLKNIPTFGSRIELSDEVLAHQKKAFEDEIIRAGQA

SEQ ID NO: 7109 - protein, 355 aa, Helicobacter pylori
  misc_feature (B) LOCATION 1...355
  hypothetical: YES
MSGISAQLVKKLRDLTDAGMMDCKKALVEVAGDLQKAIDFLREKGLSKAAKKADRIAAEGVVALEVAPDFKSAMMVEINSETDFVAKNEGFKELVKKTLETIKTHNIHTTEELLKSPLDNKPFEEYLHSQIAVIGENILVRKIAHLKAPSSHIINGYAHSNARVGVLIAIEYNNEKNAPKVVELARNIAMHAAAMKPQVLDCKDFSLDFVKKETLALIAEIEKDNEEAKRLGKPLKNIPTFGSRIELSDEVLAHQKKAFEDELKEQGKPEKIWDKIVPGKMERFIADNTLIDQRLTLLGQFYVMDDKKTIAQVIADCSKEWDDNLKITEYVRFELGEGIEKKTENFAEEVALQMK

SEQ ID NO: 7110 - protein, 307 aa, Helicobacter pylori
  misc_feature (B) LOCATION 1...307
  hypothetical: YES
MDFINIEKKWQEFWWKNKSFEPKDDFNLPKKYILSMLPYPSGEIHMGHVRNYTIGDALARYYRLHHYNVLHPMGFDSFGMPAENAAIKHGIHPKTWTYENIEAMQKEFEALGFSFSKNREFATSDPDYTKFEQQFFIDLWEKGLIYRKKAMLNWCPNDKTVLANEQVIDGRCWRCDTEVIQKELYQYYLKITNYAEELLKDLETLENHWPSQVLTMQKNWIGKSSGLQFGFKIADECLKACNNIQEIEVFTTRADTIYGVTYIAIAPEHPLVEHAIKRVSQEDLKMIKAILNTTQRERALREKRGRF

SEQ ID NO: 7111 - protein, 309 aa, Helicobacter pylori
  misc_feature (B) LOCATION 1...309
  hypothetical: YES
GVTMDFINIEKKWQEFWWRNKSFEPKDDFNLPKKYILSMLPYPSGEIHMGHVRNYTIGDALARYYRLHHYNVLHPMGFDSFGMPAENAAIKHGIHPKTWTYENIEAMQKEFEALGFSFSKNREFATSDPDYTKFEQQFFIDLWEKGLIYRKKAMLNWCPNDKTVLANEQVIDGRCWRCDTEVIQKELYQYYLKITNYAEELLKDLETLENHWPSQVLTMQKNWIGKSSGLQFGFKIADECLKACNNIQEIEVFTTRADTIYGVTYIAIAPEHPLVEHAIKRVSQEDLKMIKAILNTTQRERAVREKRGV

SEQ ID NO: 7112 - protein, 460 aa, Helicobacter pylori
  misc_feature (B) LOCATION 1...460
  hypothetical: YES
DIEFANLYHIPIKVITQSPQNLPHTKEEILKNSGEWSDLSSSLARKKILPYFDKENLGKRVINYRLQNWGVSRQRYWGAPIPMIHCKHCGIVPETQLPVTLPEDIVIDGEGNPLKKHASWRFAQCPRCHKDALVETDTMDTFIQSSWYFLRYTTPKNQRENQAFDQNYLKYFMPVDTYIGGIEHAILHLLYARFFTKALRDLGYLHLDEPFKQLITQGMVLKDGAKMSKSKGNVVSPKEILKKYGADAVRLFILFAAPPAKELEWNDNALEGAHRFIKRLYDKANAITPTTSKPEFKEVGLNEAQKLARKKVYEALKKSHEIFNKAESAYAFNTLIASCMEALNALNAQSDEQILCEGYFVLLQILEPMIPHTAWELSERLFKRENFKPIEVDESALIEDFMTLGLTINGKRRAELKVNINASKEEIIILAKKELEKYLENASVKKEIYVPNKLVNFVTA

SEQ ID NO: 7113 - protein, 485 aa, Helicobacter pylori
  misc_feature (B) LOCATION 1...485
  hypothetical: YES
LGWLISRLANYGSGALMGVPACDERDLEFANLYHIPIKVITQSPQNLPHTKEEILKNSGEWSDLSSSVAREKIIAYFEKENLGKRVINYRLQDWGVSRQRYWGAPIPMIHCKHCGIVPETQLPVTLPEDIVIDGEGNPLEKHASWKFAQCPKCHKDALRETDTMDTFIQSSWYFLRYTTPKNQRENQAFDQNYLKYFMPVDTYIGGIEHAILHLLYARFFTKALRDLGYLHLDEPFKQLITQGMVLKDGAKMSKSKGNVVSPKEILKKYGADAVRLFILFAAPPAKELEWNDNALEGAHRFIKRLYDKANAITPTTSKPEFKEVGLNEAQKLARKKVYEALKKSHEIFNKAESAYAFNTLIASCMEALNALNAQSDEQILCEGYFVLLQILEPMIPHTAWELSERLFKRENFKPIEVDESALIEDFMTLGLTINGKRRAELKVNINASKEEIIILAKKELEKYLENASVKKEIYVPNKLVNFVTA

SEQ ID NO: 7114 - protein, 806 aa, Helicobacter pylori
  misc_feature (B) LOCATION 1...806
  hypothetical: YES
MDFINIEKKWQEFWWKNKSFEPKDDFNLPKKYILSMLPYPSGEIHMGHVRNYTIGDALARYYRLHHYNVLHPMGFDSFGMPAENAAIKHGIHPKTWTYENIEAMQKEFEALGFSFSKNREFATSDPDYTKFEQQFFIDLWEKGLIYRKKAMLNWCPNDKTVLANEQVIDGRCWRCDTEVIQKELYQYYLKITNYAEELLKDLETLENHWPSQVLTMQKNWIGKSSGLQFGFKIADECLKACNNIQEIEVFTTRADTIYGVTYIAIAPEHPLVEHAIKRVSQEDSKMIKAILNTTQRERALEKKGAFLGIYAIHPLTKQKIPVWVANFALANYGSGALMGVPACDERDLEFANLYHIPIKVITQSPQNLPHTKEEILKNSGEWSDLSSSVAREKIIAYFEKENLGKRVINYRLQDWGVSRQRYWGAPIPMIHCKHCGIVPETQLPVTLPEDIVIDGEGNPLEKHASWKFAQCPKCHKDALRETDTMDTFIQSSWYFLRYTTPKNQRENQAFDQNYLKYFMPVDTYIGGIEHAILHLLYARFFTKALRDLGYLHLDEPFKQLITQGMVLKDGAKMSKSKGNVVSPKEILKKYGADAVRLFILFAAPPAKELEWNDNALEGAHRFIKRLYDKANAITPTTSKPEFKEVGLNEAQKLARKKVYEALKKSHEIFNKAESAYAFNTLIASCMEALNALNAQSDEQILCEGYFVLLQILEPMIPHTAWELSERLFKRENFKPIEVDESALIEDFMTLGLTINGKRRAELKVNINASKEEIIILAKKELEKYLENASVKKEIYVPNKLVNFVTA

SEQ ID NO: 7115 - protein, 74 aa, Helicobacter pylori
  misc_feature (B) LOCATION 1...74
  hypothetical: YES
RNPQLPRKGVKANSGPKIKEGMVFCLEPMVCQKQGEPKILADKWSVVSVDGLNTSHHEHTIAIVGNKAVILTER

SEQ ID NO: 7116 - protein, 76 aa, Helicobacter pylori
  misc_feature (B) LOCATION 1...76
  hypothetical: YES
KSRNPQLPRKGVKANSGPKIKEGMVFCLEPMVCQKQGEPKILADKWSVVSVDGLNTSHHEHTIAIVGNKAVILTER

SEQ ID NO: 7117 - protein, 247 aa, Helicobacter pylori
  misc_feature (B) LOCATION 1...247
  hypothetical: YES
KPKRNQSPKKSRELTAQALALLEREVRPGVSLLELDKMAEDFIKSSHARPAFKGLYGFPNSVCMSLNEVVIHGIPTDYVLQEGDIIGLDLGVEVDGYYGDSALTLPIGAISPQDEKLLACSKESLMHAISSIRVGMHFKELSQILEGAITERGFVPLKGFCGHGIGKKPHEEPEIPNYLEKGVKANSGPKIKEGMVFCLEPMVCQKQGEPKILADKWSVVSVDGLNTSHHEHTIAIVGNKAVILTER

SEQ ID NO: 7118 - protein, 253 aa, Helicobacter pylori
  misc_feature (B) LOCATION 1...253
  hypothetical: YES
MAISIKSPKEIKALRKAGELTAQALALLEREVRPGVSLLELDKMAEDFIKSSHARPAFKGLYGFPNSVCMSLNEVVIHGIPTDYVLQEGDIIGLDLGVEVDGYYGDSALTLPIGAISPQDEKLLACSKESLMHAISSIRVGMHFKELSQILEGAITERGFVPLKGFCGHGIGKKPHEEPEIPNYLEKGVKANSGPKIKEGMVFCLEPMVCQKQGEPKILADKWSVVSVDGLNTSHHEHTIAIVGNKAVILTER

SEQ ID NO: 7119 - protein, 128 aa, Helicobacter pylori
  misc_feature (B) LOCATION 1...128
  hypothetical: YES
AAPALNQVGSVMSLDATTFQISPWEINLLKEIERSIQEVNIGVNPNNDGETIKLFFPPMTTEQRKLIAKDAKAMGEKAKVAVRNTRQDANNKVKKLEKDKEISEDESKKAQEQIQKITDEAFKKIDES

SEQ ID NO: 7120 - protein, 185 aa, Helicobacter pylori
  misc_feature (B) LOCATION 1...185
  hypothetical: YES
MLQAIYNETKDLMQKSIQALNRDFSTLRSAKVSVNILDHIKVDYYGTPTALNQVGSVMSLDATTLQISPWEKNLLKEIERSIQEANIGVNPNNDGETIKLFFPPMTTEQRKLIAKDAKAMGEKAKVAVRNTRQDANNKVKKLEKDKEISEDESKKAQEQIQKITDEAIKKIDESVKNKEDAILKV

SEQ ID NO: 7121 - protein, 231 aa, Helicobacter pylori
  misc_feature (B) LOCATION 1...231
  hypothetical: YES
DCQVSMGEMQRMTQFKDKSLKNPKSVNVGLFNYPILMASDILLYQSDLVPVGEDQKQHLELTRNVAEKFNRDFGNCFKVPEPLIAKVGARVMGLDDPKVKMSKSHKGANHAIFLLDEPDVIVKKIKKAATDSMGVIAFDETREGVFNLLNIYMLLSDESPEKIEERFRNKGYGDFKKELAEVVIQSLKPIQERYQEISDDEVKAVLNCGAEKARPLARATYQKAKELMGLI

SEQ ID NO: 7122 - protein, 230 aa, Helicobacter pylori
  misc_feature (B) LOCATION 1...230
  hypothetical: YES
CQVSMGEMQRMTQFKDKSLKNPKSVNVGLFNYPILMASDILLYQSDLVPVGEDQKQHLELTRNVAEKFNRDFGNCFKVPEPLIAKVGARVMGLDDPKVKMSKSHKGANHAIFLLDEPDVIVKKIKKAATDSMGVIAFDETREGVFNLLNIYMLLSDESPEKIEERFRNKGYGDFKKELAEVVIQSLKPIQERYQEISDDEVKAVLNCGAEKARPLARATYQKAKELMGLI

SEQ ID NO: 7123 - protein, 326 aa, Helicobacter pylori
  misc_feature (B) LOCATION 1...326
  hypothetical: YES
MQKKRVFSGIQPTGQIHLGNYLGAIKHWVELQDEYENLFCIVNSHAITLPIEPIFLKSQTYELVKLLLACGISPKQSGLFIQSEVDEHPALAWLLDCQVSMGEMQRMTQFKDKSLKNPKSVNVGLFNYPILMASDILLYQSDLVPVGEDQKQHLELTRNVAEKFNRDFGNCFKVPEPLIAKVGARVMGLDDPKVKMSKSHKGANHAIFLLDEPDVIVKKIKKAATDSMGVIAFDETREGVFNLLNIYMLLSDESPEKIEERFRNKGYGDFKKELAEVVIQSLKPIQERYQEISDDEVKAVLNCGAEKARPLARATYQKAKELMGLI

SEQ ID NO: 7124 - protein, 85 aa, Helicobacter pylori
  misc_feature (B) LOCATION 1...85
  hypothetical: YES
MERKRYSKRYCKYTEAKISFIDYKDLDMLKHTLSERYKIMPRRLTGNSKKWQERVEVAIKRARHMALIPYIVDRKKVVDSPFKQH

SEQ ID NO: 7125 - protein, 88 aa, Helicobacter pylori
  misc_feature (B) LOCATION 1...88
  hypothetical: YES
GDIMERKRYSKRYCKYTEAKISFIDYKDLDMLKHTLSERYKIMPRRLTGNSKKWQERVEVAIKRARHMALIPYIVDRKKVVDSPFKQH

SEQ ID NO: 7126 - protein, 142 aa, Helicobacter pylori
  misc_feature (B) LOCATION 1...142
  hypothetical: YES
MRHYETMFILKPTLVEEEIKSKIEFYREVITKHHGVIETSLDMGMRNLAYEIKKHKRGYYYVAYFKADPSMILELERLYRINEDVLRFIVIKYESKKEVEAWHALVDRANKKPSHAKEKHEKTEHTHSHHAEEAKSTESHSE

SEQ ID NO: 7127 - protein, 159 aa, Helicobacter pylori
  misc_feature (B) LOCATION 1...159
  hypothetical: YES
TLLFFSKKRAIQPQGEWMRHYETMFILKPTLVEEEIKSKIEFYREVITKHHGVIETSLDMGMRNLAYEIKKHKRGYYYVAYFKADPSMILELERLYRINEDVLRFIVIKYESKKEVEAWHALVDRANKKPSHAKEKHEKTEHTHSHHAEEAKSTESHSE

SEQ ID NO: 7128 - protein, 138 aa, Helicobacter pylori
  misc_feature (B) LOCATION 1...138
  hypothetical: YES
GSGRIRKAVAFLLAQEVHFNKEGRGYVLRRILRRALRHGYLMGLKEAFLYKVVGVVCEQFSNVHAYLKESKEMVMKECFEEEERFLETLESGMELFNLSLTHLNENKIFDGKIAFKLYDTFGFPLDLTNDMLRTMGRT

SEQ ID NO: 7129 - protein, 176 aa, Helicobacter pylori
  misc_feature (B) LOCATION 1...176
  hypothetical: YES
DCKRSGVSSGVRRIEAVCGKAFYQLTKEENKELKNAKTLLKNNDVIAGINKLKESVKNSQKAPVSMDLPVEKIHGVNLVVGVVEQGDIKEMIDRLKSKHEKLLAIVFKKENERITLACGVKNVPIKANAWANEVAQILGGKGGGRDDFASAGGKDIENLQAALNLAKNTALKALEG

SEQ ID NO: 7130 - protein, 294 aa, Helicobacter pylori
  misc_feature (B) LOCATION 1...294
  hypothetical: YES
KSYKIALKCAIKQQKGIPMDIRNEFLQFFQNKGHEIYPSMPLVPNDATLLFTNAGMVQFKDIFTGIVPRPSIPRAASSQLCMRAGGKHNDLENVGYTARHHTLFEMLGNFSFGDYFKEEAILFAWEFVTKNLGFKPKDLYISVHEKDDEAVKLWEKFVPVDRIKKMGDKDNFWQMGDSGPCGPCSEIYIDQGEKHFKGSEDYFGGEGDRFLEIWNLVFMQYERSNDGVLSPLPKPSIDTGMGLERVQALLEHKLNNFDSSLFAPLMEEISELTGLDYASEFQPSFRVVAESARR

SEQ ID NO: 7131 - protein, 847 aa, Helicobacter pylori
  misc_feature (B) LOCATION 1...847
  hypothetical: YES
MDIRNEFLQFFQNKGHEIYPSMPLVPNDATLLFTNAGMVQFKDIFTGIVPRPSIPRAASSQLCMRAGGKHNDLENVGYTARHHTLFEMLGNFSFGDYFKEEAILFAWEFVTKNLGFKPKDLYISVHEKDDEAVKLWEKFVPVDRIKKMGDKDNFWQMGDSGPCGPCSEIYIDQGEKHFKGSEDYFGGEGDRFLEIWNLVFMQYERSNDGVLSPLPKPSIDTGMGLERVQALLEHKLNNFDSSLFAPLMEEISELTGLDYASEFQPSFRVVADHARAVAFLLAQEVHFNKEGRGYVLRRILRRALRHGYLMGLKEAFLYKVVGVVCEQFSNVHAYLKESKEMVMKECFEEEERFLETLESGMELFNLSLTHLNENKIFDGKIAFKLYDTFGFPLDLTNDMLRSHGACVDMQGFENCMQEQVKRSKASWKGKQNNADFSAILNAYAPNEFVGYETTECLANALGFFDSDFKEITEANPNQEVWVLLEKTPFYAEGGGAIGDRGTLFKDNEEAALVLDTKNFFGLNFSLLEIKKALKKGDQVIAQVSDERLEIAKHHSATHLLQSALREVLGSHVSQAGSLVESKRLRFDFSHAKALNDEELEKVEDLVNAQIFKHLTSQVEHMPLNQAKDKGALALFSEKYAENVRVVSFKEASIELCGGIHVENTGLIGGFRIVKESGVSSGVRRIEAVCGKAFYQLTKEENKELKNAKTLLKNNDVIAGINKLKESVKNSQKAPVSMDLPVEKIHGVNLVVGVVEQGDIKEMIDRLKSKHEKLLAIVFKKENERITLACGVKNVPIKANAWANEVAQILGGKGGGRDDFASAGGKDIENLQAALNLAKNTALKALEG

SEQ ID NO: 7132 - protein, 62 aa, Helicobacter pylori
  misc_feature (B) LOCATION 1...62
  hypothetical: YES
HLEIHEMLKKTLHKFNFGVYFKGINMRSHFCTEISEKDVGKTIKVAGWCNTYRDHGGVVLLI

SEQ ID NO: 7133 - protein, 135 aa, Helicobacter pylori
  misc_feature (B) LOCATION 1...135
  hypothetical: YES
MRSHFCTEISEKDVGKTIKVAGWCNTYRDHGGVVFIDLRDKSGLVQLVCDPSSKAYEKALEVRSEFVLVAKGKARLRGAGLENPKLKTGKIEIVLEELVIENKSATPPIEIGNKSVNEDLRLKYRYLDLRCFERL

SEQ ID NO: 7134 - protein, 174 aa, Helicobacter pylori
  misc_feature (B) LOCATION 1...174
  hypothetical: YES
LRLKVAETLDLIDKDALNFLWVVHFPMFEKTENGYHAAHHPFTMPKNIECEDIEEIEAHAYDVVLNGVELGGGSIRIHKEEMQKKVFEKININEEEAQKKFGFLLEALKFGAPPHGGFAIGFDRLIMLMTKSNSIRDVIAFPKTQKASCLLTDAPSPINEEQLRELHIRLRKPI

SEQ ID NO: 7135 - protein, 235 aa, Helicobacter pylori
  misc_feature (B) LOCATION 1...235
  hypothetical: YES
AYEIFKLRSEVALITRNALVQKGFLEIETPILSKTTPEGARDYLVPSRVHEGEFFALPQSPQLFKQLLMVGGMDRYFQIARCFRDEDLRADRQPEFTQIDAEMSFCDEDDVMGVVEDLLQEIFKAIGHTISKPFKRMPYKEAMENYGSDKPDLRFELPLIEVGDCFMDSSNSIFSNIAQDPKDKRIKALNVKGADAVFSRSVLKELEEFVRQFGAKGLAYLQIKEDGIKGPLVKF

SEQ ID NO: 7136 - protein, 234 aa, Helicobacter pylori
  misc_feature (B) LOCATION 1...234
  hypothetical: YES
YEIFKLRSEVALITRNALVQKGFLEIETPILSKTTPEGARDYLVPSRVHEGEFFALPQSPQLFKQLLMVGGMDRYFQIARCFRDEDLRADRQPEFTQIDAEMSFCDEDDVMGVVEDLLQEIFKAIGHTISKPFKRMPYKEAMENYGSDKPDLRFELPLIEVGDCFMDSSNSIFSNIAQDPKDKRIKALNVKGADAVFSRSVLKELEEFVRQFGAKGLAYLQIKEDGIKGPLVKF

SEQ ID NO: 7137 - protein, 279 aa, Helicobacter pylori
  misc_feature (B) LOCATION 1...279
  hypothetical: YES
LNAYEIFKLRSEVALITRNALAQKGFLEIETPILSKTTPEGARDYLVPSRVHEGEFFALPQSPQLFKQLLMVGGMDRYFQIARCFRDEDLRADRQPEFTQIDAEMSFCDEDDVMGVVEDLLQEIFKAIGHTISKPFKRMPYKEAMENYGSDKPDLRFELPLIEVGDCFMDSSNSIFSNIAQDPKDKRIKALNVKGADAVFSRSVLKELEEFVRQFGAKGLAYLQIKEDGIKGPLVKFLSEKGLKNILERTDAQVGDIVFLERGIKNRVRLHEALALKSG

SEQ ID NO: 7138 - protein, 448 aa, Helicobacter pylori
  misc_feature (B) LOCATION 1...448
  hypothetical: YES
LNAYEIFKLRSEVALITRNALAQKGFLEIETPILSKTTPEGARDYLVPSRVHEGEFFALPQSPQLFKQLLMVGGMDRYFQIARCFRDEDLRADRQPEFTQIDAEMSFCDEDDVMGVVEDLLQEIFKAIGHTISKPFKRMPYKEAMENYGSDKPDLRFELPLIEVGDCFMDSSNSIFSNIAQDPKDKRIKALNVKGADAVFSRSVLKELEEFVRQFGAKGLAYLQIKEDGIKGPLVKFLSEKGLKNILERTDAQVGDIVFFGAGDKKIVLDYMGRLRLKVAETLDLIDKDALNFLWVVHFPMFEKTENGYHAAHHPFTMPKNIECEDIEEIEAHAYDVVLNGVELGGGSIRIHKEEMQKKVFEKININEEEAQKKFGFLLEALKFGAPPHGGFAIGFDRLIMLMTKSNSIRDVIAFPKTQKASCLLTDAPSPINEEQLRELHIRLRKPI

SEQ ID NO: 7139 - protein, 363 aa, Helicobacter pylori
  misc_feature (B) LOCATION 1...363
  hypothetical: YES
VDNYTYSELLKSLQNKCDNIALIIKPEKIKQELERIEKEQEDPNFWQDVLKARDTNKEKVRLNRLLETYQKMKNSLDESVELFELAQNDSDEVTLSLLYEEAPTLEHSVQKVEIEIMLSGENDASNAIITIQPGAGGTESQDWASILYRMYLRWAERKSFKSEILDYQDGEEAGIKGVAFIIKGENAYGYLKNENGVHRLVRISPFDANAKRHTSFASVQISPELDDDIDIEIDEKDVRYDYYRASGAGGQHVNKTESAVRITHFPTGIVVQCQNDRSQHKNKASALKMLKSKLYELELEKQQSSAKNEEKSEIGWGHQIRSYVLAPYQQVKDARSNIAYSNVEAILDGDIDAILEGVLIAKA

SEQ ID NO: 7140 - protein, 379 aa, Helicobacter pylori
  misc_feature (B) LOCATION 1...379
  hypothetical: YES
QCYNGEFKTPLIKVLFVDNYTYSELLKSLQNKCDNIALIIKPEKIKQELERIEKEQEDPNFWQDVLKARDTNKEKVRLNRLLETYQKMKNSLDESVELFELAQNDSDEVTLSLLYEEAPTLEHSVQKVEIEIMLSGENDASNAIITIQPGAGGTESQDWASILYRMYLRWAERKSFKSEILDYQDGEEAGIKGVAFIIKGENAYGYLKNENGVHRLVRISPFDANAKRHTSFASVQISPELDDDIDIEIDEKDVRYDYYRASGAGGQHVNKTESAVRITHFPTGIVVQCQNDRSQHKNKASALKMLKSKLYELELEKQQSSAKNEEKSEIGWGHQIRSYVLAPYQQVKDARSNIAYSNVEAILDGDIDAILEGVLIAKA

SEQ ID NO: 7141 - protein, 187 aa, Helicobacter pylori
  misc_feature (B) LOCATION 1...187
  hypothetical: YES
MAIGMSELKKGLKIELGGVPYRIVEYQHVKPGKGAAFVRAKIKSFLDGKVIEKTFHAGDKCEEPNLVEKTMQYLYHDGDTYQFMDIESYEQIALNDSQVGEASKWMLDGMQVQVLLHNDKAISVDVPQVVALKIVETAPNFKGDTSSASKKPATLETGAVVQVPFHVLEGETIKVNTETEEYLEKVK

SEQ ID NO: 7142 - protein, 194 aa, Helicobacter pylori
  misc_feature (B) LOCATION 1...194
  hypothetical: YES
STREECNMTIGMSELKKGLKIELGGVPYRIVEYQHVKPDKGAAFVRAKIKSFLDDKVIEKTFHAGDKCEEPNLVEKTMQYLYHDGDTYQFMDIESYEQIALNDSQVGEASKWMLDGMQVQVLLHNDKAISVDVPQVVALKIVETAPNFKGDTSSASKKPATLETGAVVQVPFHVLEGETIKVNTETEEYLEKVK

SEQ ID NO: 7143 - protein, 501 aa, Helicobacter pylori
  misc_feature (B) LOCATION 1...501
  hypothetical: YES
MFSNQYIQQRIHKANSLREEGKNPYKNGLKRSLTNAAFLEKYAYVKGLEEPKDKEKCESVVGRVKLLRLMGKACFIKIEDESAILQAYVSQNELNDEFKSLKKHLEVGDIVLVKGFPFATKTGELSIHALEFHILSKTIVPLPEKFHGLSDIELRYRQRYLDLIVNPGVKDVFKKRSLIVSSVRKFFEMEGFLEVETPMMHPIPGGANARPFITYHNALEIERYLRIAPELYLKRLIVGGFEAVFEINRNFRNEGMDHSHNPEFTMIEFYWAYHTYEDLIELSKRLFDYLLKTLNLDSKIIYNDMEVDFNQTSVISYLDALETIGGISKGILEKEDRLLAYLLEQGIKVEPNLTHGKLLAEAFDHFVEHKLINPTFVTEYPIEISPLARRNDSNPNIADRFELFIAGKEIANGFSELNDPLDQLERFKNQVAEKEKGDEEAQYMDEDYVWALAHEMPPTAGQGIGIDRLVMLLTGAKSIKDVILFPAMRPVKNDFNVEGEE

SEQ ID NO: 7144 - protein, 504 aa, Helicobacter pylori
  misc_feature (B) LOCATION 1...504
  hypothetical: YES
RHNMFSNQYIQQRIHKANSLREEGKNPYKNGLKRSLTNAAFLEKYAYVKGLEEPKDKEKCESVVGRVKLLRLMGKACFIKIEDESAILQAYVSQNELNDEFKSLKKHLEVGDIVLVKGFPFATKTGELSIHALEFHILSKTIVPLPEKFHGLSDIELRYRQRYLDLIVNPGVKDVFKKRSLIVSSVRKFFEMEGFLEVETPMMHPIPGGANARPFITYHNALEIERYLRIAPELYLKRLIVGGFEAVFEINRNFRNEGMDHSHNPEFTMIEFYWAYHTYEDLIELSKRLFDYLLKTLNLDSKIIYNDMEVDFNQTSVISYLDALETIGGISKGILEKEDRLLAYLLEQGIKVEPNLTHGKLLAEAFDHFVEHKLINPTFVTEYPIEISPLARRNDSNPNIADRFELFIAGKEIANGFSELNDPLDQLERFKNQVAEKEKGDEEAQYMDEDYVWALAHEMPPTAGQGIGIDRLVMLLTGAKSIKDVILFPAMRPVKNDFNVEGEE

SEQ ID NO: 7145 - protein, 78 aa, Helicobacter pylori
  misc_feature (B) LOCATION 1...78
  hypothetical: YES
NAHRDLWHRFCHQRGLKRYLFQIEEAKIRDHRKLGVEIGLFSFDDEIGAGLPLWLPKGARLRKRIEDLLSQGLLFKRL

SEQ ID NO: 7146 - protein, 211 aa, Helicobacter pylori
  misc_feature (B) LOCATION 1...211
  hypothetical: YES
RMSAELIAVYKDEQIIDLESAKVLGLSDGIKALKGTEPLYFADSPLALEVIRHSCAHLLAQSLKALYPDAKFFVGPVVEEGFYYDFKTTSKISEEDLPKIEAKMKEFAKSKLAITKETLTREQALERFKGDELKHAVMSKISGDIFGVYQQGEFEDLCKGPHLPNTRFLNHFKLTKLAGAYLGGDENNEMLIGIYGIAFATKEGLKDIFSK

SEQ ID NO: 7147 - protein, 291 aa, Helicobacter pylori
  misc_feature (B) LOCATION 1...291
  hypothetical: YES
VKGCFLRGYEPVKGPEILKSDVWKISGHYDNYKENMYFTTIDEQEYGIKPMNCVGHIKVYQSALHSYRDLPLRFYEYGVVHRHEKSGVLHGLLRVREFTQDDAHIFCSFEQIQSEVSAILDFTHKIMQAFGFSYEMELSTRPAKSIGDDKVWEKATNALKEALKEHRIDYKIDEGGGAFYGPKIDIKITDALKRKWQCGTIQVDMNLPERFKLAFTNEYNHAEQPVMIHRAILGSFERFIAILSEHFGGNFPFFVAPTQIALIPINEEHHGFCFEIKRGAKKVRYFCRSVG

SEQ ID NO: 7148 - protein, 612 aa, Helicobacter pylori
  misc_feature (B) LOCATION 1...612
  hypothetical: YES
MSAELIAVYKDEQIIDLESAKVLGLSDGIKALKGTEPIYFDDSPLALEVIRHSCAHLLAQSLKALYPDAKFFVGPVVEEGFYYDFKTTSKISEEDLPKIEAKMKEFAKSKLAITKETLTREQALERFKGDELKHAVMSKISGDIFGVYQQGEFEDLCKGPHLPNTRFLNHFKLTKLAGAYLGGDENNEMLIRIYGIAFATKEGLKDYLFQIEEAKKRDHRKLGVELGLFSFDDEIGAGLPLWLPKGARLRKRIEDLLSQALLLRGYEPVKGPEILKSDVWKISGHYDNYKENMYFTTIDEQEYGIKPMNCVGHIKVYQSALHSYRDLPLRFYEYGVVHRHEKSGVLHGLLRVREFTQDDAHIFCSFEQIQSEVSAILDFTHKIMQAFGFSYEMELSTRPAKSIGDDKVWEKATNALKEALKEHRIDYKIDEGGGAFYGPKIDIKITDALKRKWQCGTIQVDMNLPERFKLAFTNEYNHAEQPVMIHRAILGSFERFIAILSEHFGGNFPFFVAPTQIALIPINEEHHVFALKLKEALKKCDIFVEVLDKNDSLNKKVRLAEKQKIPMILVLGNEEVETEILSIRDREKQAQYKMPLKEFLNMVESKMQEVSF

SEQ ID NO: 7149 - protein, 116 aa, Helicobacter pylori
  misc_feature (B) LOCATION 1...116
  hypothetical: YES
MRVKTGVVRRRRHKKVLKLARGFYSGRRKHFRKAKEQLERSMYYAFRDRKQKKREFRSLWVVRINAACRMHNTSYSRFMHALKVANIELDRKVLADMAMNDMQAFKSVLESVKEHL

SEQ ID NO: 7150 - protein, 141 aa, Helicobacter pylori
  misc_feature (B) LOCATION 1...141
  hypothetical: YES
FLSRNEVLLNGDINFKEVRCVGDNGEVYGIISSKEALKIAQNLGLDLVLISASAKPPVCKVMDYNKFRYQNEKKIKEAKKKQKQIEIKEIKLSTQIAQNDINYKVKRAREFIESNKHVKFKVVLKGRESQNSKAGLDVLFR

SEQ ID NO: 7151 - protein, 203 aa, Helicobacter pylori
  misc_feature (B) LOCATION 1...203
  hypothetical: YES
LSRNEVLLNGDINFKEVRCVGDNGEVYGIISSKEALKIAQNLGLDLVLISASAKPPVCKVMDYNKFRYQNEKKIKEAKKKQKQIEIKEIKLSTQIAQNDINYKVKHAREFIESNKHVKFKVVLKGRESQNSKAGLDVLFRVQTMMQDLANPEKEPKTEGRFVSWMFVPKAKEAPKNEKKTKENNPPFNRINLMKGENHAKNED

SEQ ID NO: 7152 - protein, 64 aa, Helicobacter pylori
  misc_feature (B) LOCATION 1...64
  hypothetical: YES
MPKMKTNRGASKRFKVKKNLIKRGSAFKSHILTKKSPKRKANLNAPKHVHHTNAHSVMSLLCRA

SEQ ID NO: 7153 - protein, 131 aa, Helicobacter pylori
  misc_feature (B) LOCATION 1...131
  hypothetical: YES
MAKRNVTAKKKVVKKNIARGVVYISATFNNTNITITDEMGNVICWSTAGGLGFKGSKKSTPYAAQQAVESALSKAKEHGVKEVGIKVQGPGSGRETAIKSVGATEGVKVLWIKDITPLPHNGCRPPKRRRV

SEQ ID NO: 7154 - protein, 58 aa, Helicobacter pylori
  misc_feature (B) LOCATION 1...58
  hypothetical: YES
TAHRHVFAYLQNKEATHKLVTEIAPKYAQRNGGYSRIQRTTLEEGTLPLWPSLNLCEI

SEQ ID NO: 7155 - protein, 116 aa, Helicobacter pylori
  misc_feature (B) LOCATION 1...116
  hypothetical: YES
MRHKHGYRKLGRTSSHRKALLKNLAIALIEHNKIETGIYKAKELRSYIEKLTTVARVGDFNAHRHVFAYLQNKEATHKLVTEIAPKYAQRNGGYTRIQRTTFRRGDASTLATIEFV

SEQ ID NO: 7156 - protein, 62 aa, Helicobacter pylori
  misc_feature (B) LOCATION 1...62
  hypothetical: YES
KNPAKHLVEGDLRKKVQMDIKSLMDLGNYRGIRHRKGLPVRGQTTKNNARTRKGKKKTVGSK

SEQ ID NO: 7157 - protein, 84 aa, Helicobacter pylori
  misc_feature (B) LOCATION 1...84
  hypothetical: YES
VGISFDKRVHELSEDEVSSIAKKIQQSYLVEGDLRKKVQMDIKSLMDLGNYRGIRHRKGLPVRGQTTKNNARTRKGKKKTVGSK

SEQ ID NO: 7158 - protein, 118 aa, Helicobacter pylori
  misc_feature (B) LOCATION 1...118
  hypothetical: YES
NYIVLIERRLDNVFYRMGCATTRSSARQLVTHEHVLVDGKRVDIPSYIARSGQKIEIKEKTKSNPQVVRAMELTAQTGIVPWIDVEKDKKYGIFTRYPEREEVVVPIEERLIVELYSK

SEQ ID NO: 7159 - protein, 208 aa, Helicobacter pylori
  misc_feature (B) LOCATION 1...208
  hypothetical: YES
MARYRGAVERLERRFGVSLALKGERRLSGKSALDKRAYGPGQHGQRRTKTSDYGLQLKEKQKAKMMYGISEKQFRSIFVEANRLDGNTGENLIRLIERRLDNVVYRMGFATTRSSARQLVTHGHVLVDGKRLDIPSYFVRSGQKIEIKEKTKSNPQVVRAMELTAQTGIVPWIDVEKDKKYGIFTRYPEREEVVVPIEERLIVELYSK

SEQ ID NO: 7160 - protein, 46 aa, Helicobacter pylori
  misc_feature (B) LOCATION 1...46
  hypothetical: YES
LGLLTALRKLGVEAEVHGIIGATENMIGPAAYKPDDILISKEGKRH

SEQ ID NO: 7161 - protein, 47 aa, Helicobacter pylori
  misc_feature (B) LOCATION 1...47
  hypothetical: YES
SLKKAKGIEVRNTDAEGRLVLADCLSYAQDLSPDVIVDWATLLGHAL

SEQ ID NO: 7162 - protein, 71 aa, Helicobacter pylori
  misc_feature (B) LOCATION 1...71
  hypothetical: YES
AVNKASLAVNPPRLFHLVYKPKKAKKKIALVGKGLTYDSGGLSLKPADYMVTMKADKGGASAVIGPFNRVT

SEQ ID NO: 7163 - protein, 80 aa, Helicobacter pylori
  misc_feature (B) LOCATION 1...80
  hypothetical: YES
PFAPLKNSLLKTVKVGVYTCDTHAKDNALLENLKALFLGLKLGLYEYDTLKPNKKESAPKEVIAAPELHKHCEKNSREFF

SEQ ID NO: 7164 - protein, 83 aa, Helicobacter pylori
  misc_feature (B) LOCATION 1...83
  hypothetical: YES
QEKPLDFNTILERYEIKKGDFTLKIKLEKTTFENAKAECSLVFITNKDFDHVWVKNKKLLETFKYEGEGAFLDQENKILSVGR

SEQ ID NO: 7165 - protein, 134 aa, Helicobacter pylori
  misc_feature (B) LOCATION 1...134
  hypothetical: YES
SWIGRPYWGMRCRLRRIHSAIMGHNEELKNLFETSGLESGELLAKLPFNRHLKKLIESKIADVCNISSSRYGGAITAGLFLNEFIRDEFKDKWLHIDIAGPAYVEKEWDVNSFGASGAGVRACTAFVEELLKKA

SEQ ID NO: 7166 - protein, 459 aa, Helicobacter pylori
  misc_feature (B) LOCATION 1...459
  hypothetical: YES
LLETFKYEGEGAFLDQENKILYVGVKEDDVHLLRESACLAVRTLKKLAFKSVKVGVYTCDTHAKDNALLENLKALFLGLKLGLYEYDTFKPNKKESVLKEVIVALELHKHCEKTCANSLEKSAKEALKYAEIMTESLNIVRDLVNTPPMIGTPVYMAEVAQKVAKENHLEIHVHDEKFLEEKKMNAFLAVNKASLAVNPPRLIHLVYKPKKAKKKIALVGKGLTYDCGGLSLKPADYMVTMKADKGGGSAVIGLLNALAKLGVEAEVHGIIGATENMIGPAAYKPDDILISKEGKSIEVRNTDAEGRLVLADCLSYAQDLSPDVIVDFATLTGACVVGLGEFTSAIMGHNEELKNLFETSGLESGELLAKLPFNRHLKKLIESKIADVCNISSSRYGGAITAGLFLNEFIRDEFKDKWLHIDIAGPAYVEKEWDVNSFGASGAGVRACTAFVEELLKKA

SEQ ID NO: 7167 - protein, 352 aa, Helicobacter pylori
  misc_feature (B) LOCATION 1...352
  hypothetical: YES
MSILAEKLSSILKRYDELTALLSSVEVVSDIKKLTELSKEQSSIEEISVASKEYLSVLEGIKENKELLEDKELSELAKEELKILEIQKSELETAIKQLLIPKDPNDDKNIYLELRAGTGGDEAGIFVGDLFKAYCRYADLKKWKVEIVSSSENSVGGYKEIIVLIKGKGVYSRLKFEAGTHRVQRVPETESQGRIHTSAITVAIMPEVDDVEVSINPSDLKIEVFRAGGHGGQCVNTTDSAVRITHLPTNISVSMQDEKSQHKNKDKALKILKARLYEKQIEEQQLANAKDRKEQVGSGDRSERIRTYNYPQNRLSEHRINLTLYSLEEIMLSGNLDEVINPLIAHAQSQFE

SEQ ID NO: 7168 - protein, 354 aa, Helicobacter pylori
  misc_feature (B) LOCATION 1...354
  hypothetical: YES
SRMSILAEKLSSILKRYDELTALLSSVEVVSDIKKLTELSKEQSSIEEISVASKEYLSVLEGIKENKELLEDKELSELAKEELKILEIQKSELETAIKQLLIPKDPNDDKNIYLELRAGTGGDEAGIFVGDLFKAYCRYADLKKWKVEIVSSSENSVGGYKEIIVLIKGKGVYSRLKFEAGTHRVQRVPETESQGRIHTSAITVAIMPEVDDVEVSINPSDLKIEVFRAGGHGGQCVNTTDSAVRITHLPTNISVSMQDEKSQHKNKDKALKILKARLYEKQIEEQQLANAKDRKEQVGSGDRSERIRTYNYPQNRLSEHRINLTLYSLEEIMLSGNLDEVINPLIAHAQSQFE

SEQ ID NO: 7169 - protein, 141 aa, Helicobacter pylori
  misc_feature (B) LOCATION 1...141
  hypothetical: YES
MTKTAKVNDIVRDWVVLDAKDKVFGRLITEIAVLLRGKHRPFYTPNVDCGDFVVVINANKVKFSGMKLEDKEYFTHSGYFGSTKSKTLQEMLEKTPEKLYHLAVRGMLPKTKLGKAMIKKLKVYRDDKHPHTAQTSKKDAK

SEQ ID NO: 7170 - protein, 147 aa, Helicobacter pylori
  misc_feature (B) LOCATION 1...147
  hypothetical: YES
FYQRILMTKTAKVNDIVRDWVVLDAKDKVFGRLITEIAVLLRGKHRPFYTPNVDCGDFVVVINANKVKFSGMKLEDKEYFTHSGYFGSTKSKTLQEMLEKTPEKLYHLAVRGMLPKTKLGKAMIKKLKVYRDDKHPHTAQTSKKDAK

SEQ ID NO: 7171 - protein, 89 aa, Helicobacter pylori
  misc_feature (B) LOCATION 1...89
  hypothetical: YES
MANHKSAEKRIRQTIKRTERNRFYKTKVKNIIKAVREAVAINDVAKAQERLKIANKELHKFVSKGILKKNTASRKVSRLNASVKKIALA

SEQ ID NO: 7172 - protein, 92 aa, Helicobacter pylori
  misc_feature (B) LOCATION 1...92
  hypothetical: YES
NKAMANHKSAEKRIRQTIKRTERNRFYKTKVKNIIKAVREAVAINDVAKAQERLKIANKELHKFVSKGILKKNTASRKVSRLNASVKKIALA

SEQ ID NO: 7173 - protein, 129 aa, Helicobacter pylori
  misc_feature (B) LOCATION 1...129
  hypothetical: YES
MRKIYATGKRKTAIAKVWLTPGKGELSINEQSLNQWLGGHEAIKMKVMQPLLLTKQEQSVDIKAVVFGGGYSAQAEALRHGISKALNAYDIAFRAILKPKGLLTRDSRVVERKKYGKRKARRSPQFSKR

SEQ ID NO: 7174 - protein, 129 aa, Helicobacter pylori; identical to SEQ ID NO: 7173
  misc_feature (B) LOCATION 1...129
  hypothetical: YES

SEQ ID NO: 7175 - protein, 161 aa, Helicobacter pylori
  misc_feature (B) LOCATION 1...161
  hypothetical: YES
MPDELRAEKSFPSKPYDSLKNKSEFDRVYRKGFKKHNPFFSLFVLDLSKEPPKEKEGFKDPLSCRLKDRNTLCLLGLSVSKKVGNAVKRNLIKRRLRSLVTRHAALCQGFALVFVPRSDCYHLDFWALEKHFLEMLTSIKDYMNKALKDLKKGMTHTHAKQ

SEQ ID NO: 7176 - protein, 162 aa, Helicobacter pylori
  misc_feature (B) LOCATION 1...162
  hypothetical: YES
LMPDELRAEKSFPSKPYDSLKNKSEFDRVYRKGFKKHNPFFSLFVLDLSKEPPKEKEGFKDPLSCRLKDRNTLCLLGLSVSKKVGNAVKRNLIKRRLRSLVTRHAALCQGFALVFVPRSDCYHLDFWALEKHFLEMLTSIKDYMNKALKDLKKGMTHTHAKQ

SEQ ID NO: 7177 - protein, 113 aa, Helicobacter pylori
  misc_feature (B) LOCATION 1...113
  hypothetical: YES
MKRVLLGEFMEKIRLKLKAYDHRVLDRSVVAIVEAVKRSGSEIRGPIPLPTKNKRYTVLRSPHVNKDSREQFEIRVYSRLIDIISATPETVDSLMKLDLAPEVDVEVTSMETK

SEQ ID NO: 7178 - protein, 114 aa, Helicobacter pylori
  misc_feature (B) LOCATION 1...114
  hypothetical: YES
RMIRVLLGEFMEKIRLKLKAYDHRVLDRSVVAIVEAVKRSGFEIRGPIPLPTKNKRYTVLRSPHVNKDSREQFEIRVYSRLIDIISATPETVDSLMKLDLAPEVDVEVTSMETK

SEQ ID NO: 7179 - protein, 162 aa, Helicobacter pylori
  misc_feature (B) LOCATION 1...162
  hypothetical: YES
MTAHTPCFRSEAGSAGKDTRGMIRQHQFDKVELVAITHPKESDAMQEHMLESASEILKALELPHRFVQLCSGDLGFSASNTIDIEVWLPGQNCYREISSVSNTRDFQARRAKIRFKENQKNQLVHTLNGSSLAVGRTMVALMENHQQADGSIHIPKALEKYL

SEQ ID NO: 7180 - protein, 162 aa, Helicobacter pylori; identical to SEQ ID NO: 7179
  misc_feature (B) LOCATION 1...162
  hypothetical: YES

SEQ ID NO: 7181 - protein, 356 aa, Helicobacter pylori
  misc_feature (B) LOCATION 1...356
  hypothetical: YES
LVLKWLQKMETSDLKKELENNKIKLNELSKSVGEAEQEMDLKLSIIPNLVDEKTPLGASEEDNIEIKKILTPRNFTFKPKEHFELAQQNGWIDFESGVKLAKSRFSVIRGFGAKIYRALIHLMLDFNEKNGFEIIYTPALVNEKMLFGTGQLPKFKEDVFKIENENLYLIPTAEVTLTNLYNDTIISVENLPIKMTAHTPCFRSEAGSAGKDTRGMIRQHQFDKVELVAITHPKESDAMQEHMLESASEILKALELPHRFVQLCSGDLGFSASNTIDIEVWLPGQNCYREISSVSNTRDFQARRAKIRFKENQKNQLVHTLNGSSLAVGRTMVALMENHQQADGSIHIPKALEKYL

SEQ ID NO: 7182 - protein, 415 aa, Helicobacter pylori
  misc_feature (B) LOCATION 1...415
  hypothetical: YES
MIDRKLLLQDFDKVALSLKKRNHAMDDELERLREAIAHYKKQLIELEGLQAFQNKVSKEFGIKMAQKMDTSDLKKELENNKIKLNELSKSVGEAEQEMDLKLSIIPNLVDEKTPLGASEEDNIEIKKILTPRNFTFKPKEHFELAQQNGWIDFESGVKLAKSRFSVIRGFGAKIYRALIHLMLDFNEKNGFEIIYTPALVNEKMLFGTGQLPKFKEDVFKIENENLYLIPTAEVTLTNLYNDTIISVENLPIKMTAHTPCFRSEAGSAGKDTRGMIRQHQFDKVELVAITHPKESDAMQEHMLESASEILKALELPHRFVQLCSGDLGFSASNTIDIEVWLPGQNCYREISSVSNTRDFQARRAKIRFKENQKNQLVHTLNGSSLAVGRTMVALMENHQQADGSIHIPKALEKYL

SEQ ID NO: 7183 - protein, 160 aa, Helicobacter pylori
  misc_feature (B) LOCATION 1...160
  hypothetical: YES
IRSLASWIFLSFFLPNSNAYLCVYKDFILLKPQTYMNLSGESVLSAKNFYKTKELLIVHDDLDLPLGVVKFKKGGGNGGHNGLKSIDALCSNSYYRLRVGISKGINITEHVLSKFHNNEEPLKNAAFEHAKNALKFFIESHDFNATQNRFTLKKPLQIES

SEQ ID NO: 7184 - protein, 186 aa, Helicobacter pylori
  misc_feature (B) LOCATION 1...186
  hypothetical: YES
MTLLVGLGNPTLRYDHTRHNAGFDILDSLVSELDLSFIFSPKHNAYLCVYKDFILLKPQTYMNLSGESVLSAKNFYKTKELLIVHDDLDLPLGVVKFKKGGGNGGHNGLKSIDALCSNSYYRLRVGISKGINITEHVLSKFHNNEEPLKNAAFEHAKNALKFFIESHDFNATQNRFTLKKPLQIES

SEQ ID NO: 7185 - protein, 145 aa, Helicobacter pylori
  misc_feature (B) LOCATION 1...145
  hypothetical: YES
MRIVFMGTPSFAEVILRALVENEDKKIEVVGLFTQRDKPFGRKKELKAPETKTYILENHLNIPIFQPQSLKEPEVQILKGLKPDFIVVVAYGKILPKEVLTIAPCINLHASLLPKYRGASPIHEMILNDDRIYGISTMLMXFGIG

SEQ ID NO: 7186 - protein, 305 aa, Helicobacter pylori
  misc_feature (B) LOCATION 1...305
  hypothetical: YES
MRIVFMGTPSFAEVILRALVENEDKKIEVVGLFTQRDKPFGRKKELKAPETKTYILENHLNIPIFQPQSLKEPEVQILKGLKPDFIVVVAYGKILPKEVLTIAPCINLHASLLPKYRGASPIHEMILNDDRIYGISTMLMDLELDSGDILESASFLREDYLDLDALSLKLARMGATLLLSTLKNFHSITRKPQDHMQASFCKKIAKADGLVGFKDAKNLFLKSLAFKSWPEIFLENSLKLLEVELVENEKSHKEGEILAIDERGVLVGCLKGSVRIARLQAVGKKPLKAKDYLNGRRLKVGGILT

SEQ ID NO: 7187 - protein, 320 aa, Helicobacter pylori
  misc_feature (B) LOCATION 1...320
  hypothetical: YES
NDDENKVIELKTRNNMRIVFMGTPSFAEVILRALVENEDKKIEVVGLFTQRDKPFGRKKELKAPETKTYILENHLNIPIFQPQSLKEPEVQILKGLKPDFIVVVAYGKILPKEVLTIAPCINLHASLLPKYRGASPIHEMILNDDRIYGISTMLMDLELDSGDILESASFLREDYLDLDALSLKLARMGATLLLSTLKNFHSITRKPQDHMQASFCKKIAKADGLVGFKDAKNLFLKSLAFKSWPEIFLENSLKLLEVELVENEKSHKEGEILAIDERGVLVGCLKGSVRIARLQAVGKKPLKAKDYLNGRRLKVGGILT

SEQ ID NO: 7188 - protein, 64 aa, Helicobacter pylori
  misc_feature (B) LOCATION 1...64
  hypothetical: YES
MFMPLLARRVFLKKKSKKTCLSVVKTINRLKPSSAKGEYIRNAALSLTMSPSVNLDAQELMDIK

SEQ ID NO: 7189 - protein, 66 aa, Helicobacter pylori
  misc_feature (B) LOCATION 1...66
  hypothetical: YES
RVMFMPLLARRVFLKKKSKKTCLSVVKTINRLKPSSAKGEYIRNAALSLTMSPSVNLDAQELMDIK

SEQ ID NO: 7190 - protein, 73 aa, Helicobacter pylori
  misc_feature (B) LOCATION 1...73
  hypothetical: YES
LNFRVDRTGNVHAPIGKASFPEEKIKENMLELVKTINRLKPSSAKGKYIRNAALSLTMSPSVNLDAQELMDIK

SEQ ID NO: 7191 - protein, 125 aa, Helicobacter pylori
  misc_feature (B) LOCATION 1...125
  hypothetical: YES
MAISKEEVLEYIGSLSVLELSELVKMFEEKFGVSATPTVVAGAAVAGGAAAESEEKTEFNVILADSGAEKIKVIKVVREITGLGLKEAKDATEKTPHVLKEGVNKEEAETIKKKLEEVGAKVEVK

SEQ ID NO: 7192 - protein, 71 aa, Helicobacter pylori
  misc_feature (B) LOCATION 1...71
  hypothetical: YES
HKVELVANLKSQFDSAKALLICDYKGLSVKKLEALRNKARIQGIKVQVIKNTLAHIAMKEVGCADLDLKET

SEQ ID NO: 7193 - protein, 164 aa, Helicobacter pylori
  misc_feature (B) LOCATION 1...164
  hypothetical: YES
MQKQHQRQHKVELVANLKSQFDSAKALLICDYKGLSVKKLEALRNKARIQGIKVQVIKNTLAHIAMKEVGCADLDLKETNVFLWGDDQIALSKLVFDFQKEHKDHFVLKAGLFDKESVSVAHVEAVSKLPSKEELMGMLLSVWTAPARYFVTGLDNLRKAKEEN

SEQ ID NO: 7194 - protein, 82 aa, Helicobacter pylori
  misc_feature (B) LOCATION 1...82
  hypothetical: YES
LKNIYVGNLVYSATSEQVKELFSQFGKVFNVKLIYDRETKKPKGFGFVEMQEEGVREAIAKLDNTDFMGRTIRVTEANPKKS

SEQ ID NO: 7195 - protein, 106 aa, Helicobacter pylori
  misc_feature (B) LOCATION 1...106
  hypothetical: YES
KCYFFITFSYSYGYVVIFLPENFILKNIYVGNLVYSATSEQVKELFSQFGKVFNVKLIYDRETKKPKGFGFVEMQEEGVREAIAKLDNTDFMGRTIRVTEANPKKS

SEQ ID NO: 7196 - protein, 105 aa, Helicobacter pylori
  misc_feature (B) LOCATION 1...105
  hypothetical: YES
VTLSVKTDQKIILGNQKVLKARLSDAVFFYENDLKKPLDNAPLESVVFVQGLGTLKDKMERESIIAQYLTQKYISSFSMPLEKALSLLAQPFQISLVEVSHIWWV

SEQ ID NO: 7197 - protein, 173 aa, Helicobacter pylori
  misc_feature (B) LOCATION 1...173
  hypothetical: YES
VFLVQSWALSLKIDSLFSLFSVGKIPSGSKDPFALRRLSFGLLKIIAHYGLEFDLKADLKNLFEKVGVYQSFDLEVLEKFLLERFHNLIDCNLSIIRSVLNTNERDIVKIIQKVKALKRFLDNPKNAQKKELLFSAFKRLANINKDRNPNESSGFSTSLFKELQEHALFEAFN

SEQ ID NO: 7198 - protein, 251 aa, Helicobacter pylori
  misc_feature (B) LOCATION 1...251
  hypothetical: YES
YLPASENAPLPSSVFSSIVALSLKIDSLFSLFSVGKIPSGSKDPFALRRLSFGLLKIIAHYGLEFDLKADLKNLFEKVGVYQSFDLEVLEKFLLERFHNLIDCNLSIIRSVLNTNERDIVKIIQKVKALKRFLDNPKNAQKKELLFSAFKRLANINKDRNPNESSGFSTSLFKELQEHALFEAFNAIKTSTFESLDSKIEAYFGLHAPLEEYFKSVLVMDKDIEIQKNRKNFLWGVYQSFLEIGDIKEIAI

SEQ ID NO: 7199 - protein, 354 aa, Helicobacter pylori
  misc_feature (B) LOCATION 1...354
  hypothetical: YES
FCFLGRIEILHSDELLVEVLVEELPAQALLNEYKEMPKKLHALFQKRALEVGNIEVFYTPRRLCLFVKDFPLLTQETKEEFFGPPVKIACNNQDKTQGLNALGLGFYQKLGLKDHQHFQTAFKSNKEVLYHAKIHAKQPTKDLIMPIVLEFLEGLNFGKSMRWGNVEKSFIRPIHNICVLFNGENFNDIEIKEYGFKTKQATKAHRQEGFDFIEVDSPKAYFEVLEKNHVILDPKKREAKILQEIKGLEKKHDIIVEVDRDLLDEVVAITEYPTALLGEFDKAFLKLPSEIITTSMKENQRYFAIFNQKSQEESPTLHNGFIVVSNAISKDRSKNHFRQSKGFKSPLERCGFLL

SEQ ID NO: 7200 - protein, 701 aa, Helicobacter pylori
  misc_feature (B) LOCATION 1...701
  hypothetical: YES
LHSDELLVEVLVEELPAQALLNEYKEMPKKLHALFQKRALEVGNIEVFYTPRRLCLFVKDFPLLTQETKEEFFGPPVKIACNNQDKTQGLNALGLGFYQKLGLKDHQHFQTAFKSNKEVLYHAKIHAKQPTKDLIMPIVLEFLEGLNFGKSMRWGNVEKSFIRPIHNICVLFNGENFNDIEIKEYGFKTKQATKAHRQEGFDFIEVDSPKAYFEVLEKNHVILDPKKREAKILQEIKGLEKKHDIIVEVDRDLLDEVVAITEYPTALLGEFDKAFLKLPSEIITTSMKENQRYFAIFNQKSQEESPTLHNGFIVVSNAISKDKQKIILGNQKVLKARLSDAVFFYENDLKKPLDNAPLESVVFVQGLGTLKDKMERESIIAQYLTQKYISSLSMPLEKALELISRAIQIAKADLLSEVVYEFSELQGIMGYYYALKQNENELVALSVKEQYLPASENAPLPSSVFSSIVALSLKIDSLFSLFSVGKIPSGSKDPFALRRLSFGLLKIIAHYGLEFDLKADLKNLFEKVGVYQSFDLEVLEKFLLERFHNLIDCNLSIIRSVLNTNERDIVKIIQKVKALKRFLDNPKNAQKKELLFSAFKRLANINKDRNPNESSGFSTSLFKELQEHALFEAFNAIKTSTFESLDSKIEAYFGLHAPLEEYFKSVLVMDKDIEIQKNRKNFLWGVYQSFLEIGDIKEIAI

SEQ ID NO: 7201 - protein, 120 aa, Helicobacter pylori
  misc_feature (B) LOCATION 1...120
  hypothetical: YES
MNTXPLIATLLQAPLHVLGIREPVSFQPFYPKTEKPNRPQKFAHVSSMPSLEFLEKLVIRYLLEDRSLLDLAVGYIHSGVFLHKKQEFDALCQEKLDDPKLVALLLDANLPLKKGGFEKE

SEQ ID NO: 7202 - protein, 529 aa, Helicobacter pylori
  misc_feature (B) LOCATION 1...529
  hypothetical: YES
KMILKSSIDRLLQTIDIVEVISSYVDLRKSGSNYMACCPFHEERSASFSVNQVKGFYYCFGCGASGDSIKFVMAFEKLSFVEALEKLAHRFNIALEYDKGVYYDHKEDYHLLEMVSSLYQEELFNAPFFLNYLQKRGLSMESIKAFKLGLCTNKIDYGIENKGLNKDKLIELGVLGKSDKEDKTYLRFLDRIMFPIYSPSAQVVGFGGRTLKEKAAKYINSPQNKLFDKSSLLYGYHLAKEHIYKQKQVIVTEGYLDVILLHQAGFKNAIATLGTALTPSHLPLLKKGDPEILLSYDGDKAGRNAAYKASLMLAKEQRKGGVILFENNLDPADMIANHQIETLKNWLSRPIAFIEFVLRHMAGSYLLDDPLEKDKALKEMLGFLKNFSLLLQNEYKPLIATLLQAPLHVLGIREPVSFQPFYPKTEKPNRPQKFAHVSSMPSLEFLEKLVIRYLLEDRSLLDLAVGYIHSGVFLHKKQEFDALCQEKLDDPKLVALLLDANLPLKKGGFEKELRLLILRYFEPPTQRNP

SEQ ID NO: 7203 - protein, 559 aa, Helicobacter pylori
  misc_feature (B) LOCATION 1...559
  hypothetical: YES
MILKSSIDRLLQTIDIVEVISSYVDLRKSGSNYMACCPFHEERSASFSVNQVKGFYYCFGCGASGDSIKFVMAFEKLSFVEALEKLAHRFNIALEYDKGVYYDHKEDYHLLEMVSSLYQEELFNAPFFLNYLQKRGLSMESIKAFKLGLCTNKIDYGIENKGLNKDKLIELGVLGKSDKEDKTYLRFLDRIMFPIYSPSAQVVGFGGRTLKEKAAKYINSPQNKLFDKSSLLYGYHLAKEHIYKQKQVIVTEGYLDVILLHQAGFKNAIATLGTALTPSHLPLLKKGDPEILLSYDGDKAGRNAAYKASLMLAKEQRKGGVILFENNLDPADMIANHQIETLKNWLSRPIAFIEFVLRHMAGSYLLDDPLEKDKALKEMLGFLKNFSLLLQNEYKPLIATLLQAPLHVLGIREPVSFQPFYPKTEKPNRPQKFAHVSSMPSLEFLEKLVIRYLLEDRSLLDLAVGYIHSGVFLHKKQEFDALCQEKLDDPKLVALLLDANLPLKKGGFEKELRLLILRYFERQLKEIPKSPLSFSEKMIFLKRARQAIMKLKQGELVAI

SEQ ID NO: 7204 - protein, 138 aa, Helicobacter pylori
  misc_feature (B) LOCATION 1...138
  hypothetical: YES
MATRTQARGAVVELLYAFESGNEEIKKIASSMLEEKKIKNNQLAFALSLFNGVLEKINEIDALIEPHLKDWDFKRLGSMEKAILRLGAYEIGFTPTQNPIIINECIELGKLYAEPNTPKFLNAILDSLSKKLAQKPLI

SEQ ID NO: 7205 - protein, 147 aa, Helicobacter pylori
  misc_feature (B) LOCATION 1...147
  hypothetical: YES
ACAKLSRIKMATRTQARGAVVELLYAFESGNEEIKKIASSMLEEKKIKNNQLAFALSLFNGVLEKINEIDALIEPHLKDWDFKRLGSMEKAILRLGAYEIGFTPTQNPIIINECIELGKLYAEPNTPKFLNAILDSLSKKLAQKPLI

SEQ ID NO: 7206 - protein, 230 aa, Helicobacter pylori
  misc_feature (B) LOCATION 1...230
  hypothetical: YES
MIQIHHANAFEIIKDFHQQNLKVDAIITDPPYNISVKNNFSTLKSAKRQGIDFGEWDKNFKLLEWIARYASLINPNGCMVIFCSYRFISYIADFLEENGFVVKDFIQWVKNNPMPRNIHRRYVQDTEFALWAVKKKAKWVFNKPKNEKYLRPLILKSPVVSGIERVKHPTQKSLTLMEKIISTHTNPNDTVLDPFMGSGTTGLACKNLKRNFIGIESEKEYFQIAQKRLS

SEQ ID NO: 7207 - protein, 234 aa, Helicobacter pylori
  misc_feature (B) LOCATION 1...234
  hypothetical: YES
KAQEMIQIHHANAFEIIKDFHQQNLKVDAIITDPPYNISVKNNFSTLKSAKRQGIDFGEWDKNFKLLEWIARYASLINPNGCMVIFCSYRFISYIADFLEENGFVVKDFIQWVKNNPMPRNIHRRYVQDTEFALWAVKKKAKWVFNKPKNEKYLRPLILKSPVVSGIERVKHPTQKSLTLMEKIISTHTNPNDTVLDPFMGSGTTGLACKNLKRNFIGIESEKEYFQIAQKRLS

SEQ ID NO: 7208 - protein, 343 aa, Helicobacter pylori
  misc_feature (B) LOCATION 1...343
  hypothetical: YES
MQNLLIQAENAIALLFLLNDKNLKGKIDLIYIDPPFATNNHFTITNGRATTISNSKNGDIAYSDKVVGMDFMEFLKQRLVLLKELLSEQGSIYVHTDYKIGHYVKVMLDEIFGIQNFRNEITRIKCNPKNFKRIGYGNIKDMILFYSKGKNPIFNEPKIPYTPQDLEKRFPKIDKDKRRYTTVPIHAPGEVESGECSKAFKGMLPPKGRHWRTDIATLERWDKEGLIEYSNNNNPRKKIYALEQVGKRVQDIWEFKDPQYPSYPTEKNAQLLDLIIKTSSNKDSIVLDCFCGSGTTLKSAFLLQRKFIGIDNSDLAIQACKNKLETITKDLFVSQNFYDFLVF

SEQ ID NO: 7209 - protein, 346 aa, Helicobacter pylori
  misc_feature (B) LOCATION 1...346
  hypothetical: YES
IREMQNLLIQAENAIALLFLLNDKNLKGKIDLIYIDPPFATNNHFTITNGRATTISNSKNGDIAYSDKVVGMDFMEFLKQRLVLLKELLSEQGSIYVHTDYKIGHYVKVMLDEIFGIQNFRNEITRIKCNPKNFKRIGYGNIKDMILFYSKGKNPIFNEPKIPYTPQDLEKRFPKIDKDKRRYTTVPIHAPGEVESGECSKAFKGMLPPKGRHWRTDIATLERWDKEGLIEYSNNNNPRKKIYALEQVGKRVQDIWEFKDPQYPSYPTEKNAQLLDLIIKTSSNKDSIVLDCFCGSGTTLKSAFLLQRKFIGIDNSDLAIQACKNKLETITKDLFVSQNFYDFLVF

SEQ ID NO: 7210 - protein, 179 aa, Helicobacter pylori
  misc_feature (B) LOCATION 1...179
  hypothetical: YES
SLGRFYSVKKRLKATCKFLFARLKNAKRVWITCSFFGPPGLGKTSISHIIAKEMETNIKITAAPMIEKSGDLAAILTNLQAKDILFIDEIHRLSPAIEEVLYPAMEDFRLDIIIGSGPAAQTIKIDLPPFTLIGATTRAGMLSNPLRDRFGMSFRMQFYSPSELSLIIKKAAAKLFLYI

SEQ ID NO: 7211 - protein, 336 aa, Helicobacter pylori
  misc_feature (B) LOCATION 1...336
  hypothetical: YES
MKERIVNLETLDFETSQEVSLRPNLWEDFIGQEKIKSNLQISICAAKKRQESLDHMLFFGPPGLGKTSISHIIAKEMETNIKITAAPMIEKSGDLAAILTNLQAKDILFIDEIHRLSPAIEEVLYPAMEDFRLDIIIGSGPAAQTIKIDLPPFTLIGATTRAGMLSNPLRDRFGMSFRMQFYSPSELSLIIKKAAAKLNQDIKEESADEIAKRSRGTPRIALRLLKRVRDFALVKNSSLMDLSITLHALNELGVNELGFDEADLAYLSLLANAQGRPVGLNTIAASMREDEGTIEDVIEPFLLANGYLERTAKGRIATPKTHALLKIPTLNPQTLF

SEQ ID NO: 7212 - protein, 69 aa, Helicobacter pylori
  misc_feature (B) LOCATION 1...69
  hypothetical: YES
LPRHRDQIVSKEQLLDAIWEEPEMVTPNVIEVAINQIRQKMDKPLGISTVETVRRRGYRFCYPKPACEE

SEQ ID NO: 7213 - protein, 71 aa, Helicobacter pylori
  misc_feature (B) LOCATION 1...71
  hypothetical: YES
PILPRHRDQIVSKEQLLDAIWEEPEMVTPNVIEVAINQIRQKMDKPLGISTVETVRRRGYRFCYPKPACEE

SEQ ID NO: 7214 - protein, 158 aa, Helicobacter pylori
  misc_feature (B) LOCATION 1...158
  hypothetical: YES
MRVLLIEKNSVLGGEIEKGLNVKGFMADVTESLEDGEYLMDIRNYDLVMVSDKNALSFVSRIKEKHSSIVVLVSSDNPTSEEEVHAFEQGADDYIAKPYRSIKALVARIEARLRFWGSNVIEIGDLTISPDEEKIIYKGREVEVKGKPFEVLTHLAKA

SEQ ID NO: 7215 - protein, 176 aa, Helicobacter pylori
  misc_feature (B) LOCATION 1...176
  hypothetical: YES
IYDIISVRITLKCRSPYTMRVLLIEKNSVLGGEIEKGLNVKGFMADVTESLEDGEYLMDIRNYDLVMVSDKNALSFVSRIKEKHSSIVVLVSSDNPTSEEEVHAFEQGADDYIAKPYRSIKALVARIEARLRFWGSNVIEIGDLTISPDEEKIIYKGREVEVKGKPFEVLTHLAKA

SEQ ID NO: 7216 - protein, 223 aa, Helicobacter pylori
  misc_feature (B) LOCATION 1...223
  hypothetical: YES
MRVLLIEKNSVLGGEIEKGLNVKGFMADVTESLEDGEYLMDIRNYDLVMVSDKNALSFVSRIKEKHSSIVVLVSSDNPTSEEEVHAFEQGADDYIAKPYRSIKALVARIEARLRFWGSNVIEIGDLTISPDEEKIIYKGREVEVKGKPFEVLTHLARHRDQIVSKEQLLDAIWEEPEMVTPNVIEVAINQIRQKMDKPLGISTVETVRRRGYRFCYPKPACEE

SEQ ID NO: 7217 - protein, 127 aa, Helicobacter pylori
  misc_feature (B) LOCATION 1...127
  hypothetical: YES
RSETSLIQTMGRAARNANGKVLLYAKKTTQSMQKAFEITSYRRAKQEEFNKIHNITPKTVTRALEEELKLRDDEIKIAKALKKDKMPKSEREKIIKELDKKMRERAKNLDFEEAMRLRDEIAQLRTL

SEQ ID NO: 7218 - protein, 561 aa, Helicobacter pylori
  misc_feature (B) LOCATION 1...561
  hypothetical: YES
GLLKTTIIPLKNASLKMPLFDLKSPYPPAGDQPQAIEALTKSLKNNNHYQTLVGVTGSGKTYTMANIIAQTNKPALIMSHNKTLCAQLYSEFKAFFPHNRVEYFISHFDYYQPESYIPRRDLFIEKDSSINDDLERLRLSATTSLLGYDDVIVIASVSANYGLGNPEEYLKVMEKIKVGEKRAYKSFLLKLVEMGYSRNEVVFDRGSFRATGECVDIFPAYNDAEFIRIEFFGDEIERIAVFDALERNEIKRLDSVMLYAASQFAVGSERLNLAVKSIEDELALRLKFFKEQDKMLEYNRLKQRTEYDLEMISATGVCKGIENYARHFTGKAPNETPFCLFDYLGIFEREFLVIVDESHVSLPQFGGMYAGDMSRKSVLVEYGFRLPSALDNRPLKFDEFIHKNCQFLFVSATPNKLELELSQKNVAEQIIRPTGLLDPKFEVRDSDKQVQDLFDEIKSVVARGERVLITTLTKKMAEELCKYYAEWGLKVRYMHNEIDAIERNHIIRSLRLKEFDVLIGINLLREGLDLPEVSLVAIMDADKEGFLKERNKPHSNHGASR

SEQ ID NO: 7219 - protein, 658 aa, Helicobacter pylori
  misc_feature (B) LOCATION 1...658
  hypothetical: YES
MPLFDLKSPYPPAGDQPQAIEALTKSLKNNNHYQTLVGVTGSGKTYTMANIIAQTNKPALIMSHNKTLCAQLYSEFKAFFPHNRVEYFISHFDYYQPESYIPRRDLFIEKDSSINDDLERLRLSATTSLLGYDDVIVIASVSANYGLGNPEEYLKVMEKIKVGEKRAYKSFLLKLVEMGYSRNEVVFDRGSFRATGECVDIFPAYNDAEFIRIEFFGDEIERIAVFDALERNEIKRLDSVMLYAASQFAVGSERLNLAVKSIEDELALRLKFFKEQDKMLEYNRLKQRTEYDLEMISATGVCKGIENYARHFTGKAPNETPFCLFDYLGIFEREFLVIVDESHVSLPQFGGMYAGDMSRKSVLVEYGFRLPSALDNRPLKFDEFIHKNCQFLFVSATPNKLELELSQKNVAEQIIRPTGLLDPKFEVRDSDKQVQDLFDEIKSVVARGERVLITTLTKKMAEELCKYYAEWGLKVRYMHSEIDAIERNHIIRSLRLKEFDVLIGINLLREGLDLPEVSLVAIMDADKEGFLRSETSLIQTMGRAARNANGKVLLYAKKTTQSMQKAFEITSYRRAKQEEFNKIHNITPKTVTRALEEELKLRDDEIKIAKALKKDKMPKSEREKIIKELDKKMRERAKNLDFEEAMRLRDEIAQLRTL

SEQ ID NO: 7220 - protein, 341 aa, Helicobacter pylori
  misc_feature (B) LOCATION 1...341
  hypothetical: YES
LLWIGRFLRYKCTSLSNSQVKDQNKVFECLNEFNHASINSNQLEKVCKKARNAGLLGINTYALPLLKFYEYAQKLSLKSLKNIDEVMLAEFLSIYTGGLSLATKKNYRIALLGLFSYIDKQNQDKNEKSYIYNITLKNISGVNQSAGNKLPTHLNNEELEKFLESIDKIEMSAKVRARNRLLIKIIVFTGMRSNEALQLKIKDFTLENGCYTILIKGKGDKYRAVMLKAFHIESLLKEWLTERELYPVKNDLLFCNQKGSALTQAYLYKQVERIINFAGLRREKNGAHMLRHSFATLLYQKRHDLILVQEALGHASLNTSRIYTHFDKDRLKEAASIWEEN

SEQ ID NO: 7221 - protein, 356 aa, Helicobacter pylori
  misc_feature (B) LOCATION 1...356
  hypothetical: YES
MKHPLEELKDPVENLLLWIGRFLRYKCTSLSNSQVKDQNKVFECLNEFNHASINSNQLEKVCKKARNAGLLGINTYALPLLKFYEYAQKLSLKSLKNIDEVMLAEFLSIYTGGLSLATKKNYRIALLGLFSYIDKQNQDKNEKSYIYNITLKNISGVNQSAGNKLPTHLNNEELEKFLESIDKIEMSAKVRARNRLLIKIIVFTGMRSNEALQLKIKDFTLENGCYTILIKGKGDKYRAVMLKAFHIESLLKEWLTERELYPVKNDLLFCNQKGSALTQAYLYKQVERIINFAGLRREKNGAHMLRHSFATLLYQKRHDLILVQEALGHASLNTSRIYTHFDKDRLKEAASIWEEN

SEQ ID NO: 7222 - protein, 239 aa, Helicobacter pylori
  misc_feature (B) LOCATION 1...239
  hypothetical: YES
MKNKRSQNSPYVTPDNPYLTLEKALGYSFKDKRLLEQALTHKSCKLALNNERLEFLGDAVLGLVIGELLYHKFYQYDEGKLSKLRASIVSAHGFTKLAKAIALQDYLRVSSSEEISKGREKPSILSSAFEALMAGVYLEAGLAKVRKIIQNLLNRAYKRLDLEHLFMDYKTALQELTQAQFCVIPTYQLLQEKGPDHHKEFEMALYIQDKMYATAKGKSKKEAEQQCAYQALQKLKEAK

SEQ ID NO: 7223 - protein, 240 aa, Helicobacter pylori
  misc_feature (B) LOCATION 1...240
  hypothetical: YES
MMKNKRSQNSPYVTPDNPYLTLEKALGYSFKDKRLLEQALTHKSCKLALNNERLEFLGDAVLGLVIGELLYHKFXXXDGGKLSKLRASIVSAHGFTKLAKAIALQDYLRVSSSEEISKGREKPSILSSAFEALMAGVYLEAGLAKVRKIIQNLLNRAYKRLDLEHLFMDYKTALQELTQXQFCVIPTYQLLQEKGPDHHKEFEMALYIQDKMYATAKGKSKKEAEQQCAYQALQNLRKPN

SEQ ID NO: 7224 - protein, 255 aa, Helicobacter pylori
  misc_feature (B) LOCATION 1...255
  hypothetical: YES
IRGAKTGQNDHLKGKMMKNKRSQNSPYVTPDNPYLTLEKALGYSFKDKRLLEQALTHKSCKLALNNERLEFLGDAVLGLVIGELLYHKFYQYDEGKLSKLRASIVSAHGFTKLAKAIALQDYLRVSSSEEISKGREKPSILSSAFEALMAGVYLEAGLAKVRKIIQNLLNRAYKRLDLEHLFMDYKTALQELTQAQFCVIPTYQLLQEKGPDHHKEFEMALYIQDKMYATAKGKSKKEAEQQCAYQALQKLKEVK

SEQ ID NO: 7225 - protein, 619 aa, Helicobacter pylori
  misc_feature (B) LOCATION 1...619
  hypothetical: YES
MFYHLIAPLKNKTPPLTYFSKERHLKGALVNIPLRNKTLLGVVLEEVSKPSFECLELEKTPYFLLPFQIELAIFIAQYYSANLSSVLSLFAPFKECDLVGLEKIEPTLNALSQTQTNALKELQKHPASLLFGDTGSGKTEIYMHAIAQTLEQKKSALLLVPEIALTPQMQQRLKKVFKENLGLWHSKLSQNQKKQFLEKLYSQEIKLVVGTRSALFLPLKELGLIIVDEEHDFSYKSQQSPMYNARDLCLYLSHKFPIQVILGSATPSLSSYQRFKDKALVRLKGRYTPTQKNIIFEKTERFITPKLLEALKQVIDKNEQAIIFVPTRANFKTLLCPNCYKSVQCPFCSVNMSLHLKTNKLMCHYCHFSSPIPKICNACQSEVLVGKRIGTMQVLKELESLLEGAKIAILDKDHTSTPKKLHNILNDFNAQKTNILIGTQMISKGHDYAKVSLAVVLGIDNIIKSNSYRALEEGVSLLYQIAGRSARQISGQVFIQSTETDLLENFLEDYEDFLQYELQERCELYPPFSRLCLLEFKHKNEEKAQQLSLEASQTLSLCLEKGVTLSNFKAPIEKIASSYRYLILLRSKNPLSLIKSVHAFLKTAPNIPCSVNMDPVDIF

SEQ ID NO: 7226 - protein, 629 aa, Helicobacter pylori
  misc_feature (B) LOCATION 1...629
  hypothetical: YES
TPKAFRKNLIMFYHLIAPLKNKTPPLTYFSKERHLKGALVNIPLRNKTLLGVVLEEVSKPSFECLELEKTPYFLLPFQIELAIFIAQYYSANLSSVLSLFVPFKECDLVGLEKIEPTLNALSQTQTNALKELQKHPASLLFGDTGSGKTEIYMHAIAQTLEQKKSALLLVPEIALTPQMQQRLKKVFKENLGLWHSKLSQNQKKQFLEKLYSQEIKLVVGTRSALFLPLKELGLIIVDEEHDFSYKSQQSPMYNARDLCLYLSHKFPIQVILGSATPSLSSYQRFKDKALVRLKGRYTPTQKNIIFEKTERFITPKLLEALKQVIDKNEQAIIFVPTRANFKTLLCPNCYKSVQCPFCSVNMSLHLKTNKLMCHYCHFSSPIPKICNACQSEVLVGKRIGTMQVLKELESLLEGAKIAILDKDHTSTPKKLHNILNDFNAQKTNILIGTQMISKGHDYAKVSLAVVLGIDNIIKSNSYRALEEGVSLLYQIAGRSARQISGQVFIQSTETDLLENFLEDYEDFLQYELQERCELYPPFSRLCLLEFKHKNEEKAQQLSLEASQTLSLCLEKGVTLSNFKAPIEKIASSYRYLILLRSKNPLSLIKSVHAFLKTAPNIPCSVNMDPVDIF

SEQ ID NO: 7227 - protein, 148 aa, Helicobacter pylori
  misc_feature (B) LOCATION 1...148
  hypothetical: YES
LCANESHLLRLDFDATNFSHHTPMNTPLKLSVQALERYFLGQLFEFDAPLDLIGTFFQKQVWSALMTIPYGKTKSYDEIAKLINNPKSCRAIGNANRNNPISLIVPCHRVVRKNGALGGYNGGIEVKKWLLEFESKILNERAKNFLIS

SEQ ID NO: 7228 - protein, 189 aa, Helicobacter pylori
  misc_feature (B) LOCATION 1...189
  hypothetical: YES
SFDFRGVWFVAIDCFIQNLFLMTLYHYYFKTPKSFPLEYLHLCANESHLLRLDFDATNFSHHTPMNTPLKLSVQALERYFLGQLFEFDAPLDLIGTFFQKQVWSALMTIPYGKTKSYDEIAKLINNPKSCRAIGNANRNNPISLIVPCHRVVRKNGALGGYNGGIEVKKWLLEFESKILNERAKNFLIS

SEQ ID NO: 7229 - protein, 68 aa, Helicobacter pylori
  misc_feature (B) LOCATION 1...68
  hypothetical: YES
KINRQYSLKVFVKECLNNYSFENEVVCEPFTGSGTFGMVAKSMGRIPLLCEQHPKYAQNLIKLGFKEI

SEQ ID NO: 7230 - protein, 342 aa, Helicobacter pylori
  misc_feature (B) LOCATION 1...342
  hypothetical: YES
YFNKEFFMPIISKNKPYSFIKNLEFYTIKRIKDMGSHPSQDHLNELLELFKQDLSIDLKREIASSIGRQLDDDIIYNFLKQEAFKEHYMEVIYQFLRTALYKSKDMRFAKLCDDLLQHYQNENMQKMKQYYDYRHTKKPPLKIIENIIKKPSLLVGDNAQTLNKIAPSSVNLIFTSPPYYNARIYSDYKNYKDYLSAMSQSLKACFRVLEEGRFIIINVSPIITKRAGREFESVRYPIHFDFHQILIDNGFYFVDEILWIKPDFSVPNRIGGYLQNKKPLGYKPNCVSESLLVYRKKAPFLLDKNIKIAEKRLKPIKQNHTLFGKKELPIETTRLLVYYSNV

SEQ ID NO: 7231 - protein, 404 aa, Helicobacter pylori
  misc_feature (B) LOCATION 1...404
  hypothetical: YES
MPIISKNKPYSFIKNLEFYTIKRIKDMGSHPSQDHLNELLELFKQDLSIDLKREIASSIGRQLDDDIIYNFLKQEAFKEHYMEVIYQFLRTALYKSKDMRFAKLCDDLLQHYQNENMQKMKQYYDYRHTKKPPLKIIENIIKKPSLLVGDNAQTLNKIAPSSVNLIFTSPPYYNARIYSDYKNYKDYLSAMSQSLKACFRVLEEGRFIIINVSPIITKRAGREFESVRYPIHFDFHQILIDNGFYFVDEILWIKPDFSVPNRIGGYLQNKKPLGYKPNCVSESLLVYRKKAPFLLDKNIKIAEKRLKPIKQNHTLFGKKELPIETTNCWYITPKSSKDHPAVFPESLCERVLNYYSFENEVVCDPFAGSGTFGMVAKSMGRIPLLCEQHPKYAQNLIKLGFKEI

SEQ ID NO: 7232 - protein, 158 aa, Helicobacter pylori
  misc_feature (B) LOCATION 1...158
  hypothetical: YES
KNASAGTIPFLKIANDVAIAVDQLGTRKGAIAVYLEIWHIDVMEFIDLRKNSGDERRRAHDLFPALWVCDLFMKRVLEDAMWTLFDPYECKDLTELYGQDFEKRYLEYEKDPKIIKEYINAKDLWKKILMNYFEAGLPFLAFKDNANRCNSNAHAGII

SEQ ID NO: 7233 - protein, 157 aa, Helicobacter pylori
  misc_feature (B) LOCATION 1...157
  hypothetical: YES
NASAGTIPFLKIANDVAIAVDQLGTRKGAIAVYLEIWHIDVMEFIDLRKNSGDERRRAHDLFPALWVCDLFMKRVLEDAMWTLFDPYECKDLTELYGQDFEKRYLEYEKDPKIIKEYINAKDLWKKILMNYFEAGLPFLAFKDNANRCNSNAHAGII

SEQ ID NO: 7234 - protein, 161 aa, Helicobacter pylori
  misc_feature (B) LOCATION 1...161
  hypothetical: YES
FRGVSQSELEVDARLQFRDKITTEEIQQTLIKTAVDKIDIDTPNWSFVASRLFLYDLYHKVSGFTGYRHLKEYFENAEEKGRILKGFKEKFDLEFLNSQIKPERDFQFNYLGIKTLYDRYLLKDANNHPIELPQHMFMSIAMLLAPYEQGPDALALRTAVS

SEQ ID NO: 7235 - protein, 194 aa, Helicobacter pylori
  misc_feature (B) LOCATION 1...194
  hypothetical: YES
LITVVKRNGRIEPLDITKIQKYTKDATDNLEGVSQSELEVDARLQFRDKITTEEIQQTLIKTAVDKIDIDTPNWSFVASRLFLYDLYHKVSGFTGYRHLKEYFENAEEKGRILKGFKEKFDLEFLNSQIKPERDFQFNYLGIKTLYDRYLLKDANNHPIELPQHMFMSIAMFLAQNEQELNKIALEFYEMLNKF

SEQ ID NO: 7236 - protein, 345 aa, Helicobacter pylori
  misc_feature (B) LOCATION 1...345
  hypothetical: YES
FSNLCTEIFQNTAPNHYYMQIEYTDGAIEFFEEKELVTTDSNITKCANKLTSTDILKGKKIYIATKVAKDGQTAVCNLASINLSKINTEEDIKRVVPIMVRLLDNVIDLNFYPNRKVKATNLQNRAIGLGVMGEAQMLAEHQIAWGSKEHLEKIDALMEQISYHAIDTSANLAKEKGVYKDFENSEWSKGIFPIDKANNEALKLTEKGLFNHACDWQGLREKVKANGMRNGYLMAIAPTSSISILVGTTQTIEPIYKKKWFEENLSGLIPVVVPNLNVETWNFYTSAYDIDAKDLIKAAAVRQKWIDQGQSINVFLRIENASGKTLHESLHARLEIRTQIHLLFA

SEQ ID NO: 7237 - protein, 788 aa, Helicobacter pylori
  misc_feature (B) LOCATION 1...788
  hypothetical: YES
LITVVKRNGRIEPLDITKIQKYTKDATDNLEGVSQSELEVDARLQFRDKITTEEIQQTLIKTAVDKIDIDTPNWSFVASRLFLYDLYHKVSGFTGYRHLKEYFENAEEKGRILKGFKEKFDLEFLNSQIKPERDFQFNYLGIKTLYDRYLLKDANNHPIELPQHMFMSIAMFLAQNEQELNKIALEFYEVLSKFEAMCATPTLANARTTKHQLSSCYIGSTPDNIEGIFDSYKEMALLSKYGGGIGWDFSLVRSIGSYIDGHKNASAGTIPFLKIANDVAIAVDQLGTRKGAIAVYLEIWHIDVMEFIDLRKNSGDERRRAHDLFPALWVCDLFMKRVLEDAMWTLFDPYECKDLTELYGQDFEKRYLEYEKDPKIIKEYINAKDLWKKILMNYFEAGLPFLAFKDNANRCNPNAHAGIIRSSNLCTEIFQNTAPNHYYMQIEYTDGAIEFFEEKELVTTDSNITKCANKLTSTDILKGKKIYIATKVAKDGQTAVCNLASINLSKINTEEDIKRVVPIMVRLLDNVIDLNFYPNRKVKATNLQNRAIGLGVMGEAQMLAEHQIAWGSKEHLEKIDALMEQISYHAIDTSANLAKEKGVYKDFENSEWSKGIFPIDKANNEALKLTEKGLFNHACDWQGLREKVKANGMRNGYLMAIAPTSSISILVGTTQTIEPIYKKKWFEENLSGLIPVVVPNLNVETWNFYTSAYDIDAKDLIKAAAVRQKWIDQGQSINVFLRIENASGKTLHEIYTLAWKLGLKSTYYLRSESPSIDEKSVLDRSVECFNCQ

SEQ ID NO: 7238 - protein, 307 aa, Helicobacter pylori
  misc_feature (B) LOCATION 1...307
  hypothetical: YES
KHDHGFWCGIQESFDIERLRYHKIIIMTDADVDGSHIQTLLMTFFYRYLRPLIEQGHVFIAQAPLYKYKKGKTEIYLKDSVALDHFLIEHGINSVDIEGIGKNDLMNLLKVARHYRYTLLELEKRYNLLEVLRFLIETKDALSLDMKVLEKSILEKLEGLNYQILRSFATEESLHLHAQTPKGLVEFNLDDNLFKDVLFEEAHYTYQKLMEYNLDFLENKDILAFLEEVENYAKKGANIQRYKGLGEMNPNDLWETTMHKENRSLIKLKIEDLEKTDAVFSLCMGDEVEPRRAFIQAHAKDVKQLDV

SEQ ID NO: 7239 - protein, 447 aa, Helicobacter pylori
  misc_feature (B) LOCATION 1...447
  hypothetical: YES
RPGMYIGDTNVGGLHHMVYEVVDNAVDESMAGFCDTINITLTEEGSCIVEDNGRGIPVDIHPTEKIPACTVVLTILHAGGKFDNDTYKVSGGLHGVGVSVVNALSKRLIMTIKKEGQIYRQEFEKGIPISELEIIGKTKSAKESGTTIEFFPDESVMEVVEFQAGILQKRFKEMAYLNDGLKISFKEEKTQLQETYFYKDGLKQFVKDSAKKELLTPIIAFKSMDEETRTSIEVALAYADDYNENTLSFVNNIKTSEGGTHEAGFKMGLSKAILQYIDNNIKTKESRPISEDIKEGLIAVVSLKMSEPLFEGQTKSKLGSSYARALVSKLVYDKIHQFLEENPNEAKIIANKALLAAKAREASKKARELTRKKDNLSVGTLPGKLADCQSKDPLESEIFLVEGDSAGGSAKQGRDRVFQAILPLKGKILNVEKSHLSKILNQKKLKT

SEQ ID NO: 7240 - protein, 773 aa, Helicobacter pylori
  misc_feature (B) LOCATION 1...773
  hypothetical: YES
MQNYQSHSIKVLKGLEGVRKRPGMYIGDTNVGGLHHMVYEVVDNAVDESMAGFCDTINITLTEEGSCIVEDNGRGIPVDIHPTEKIPACTVVLTILHAGGKFDNDTYKVSGGLHGVGVSVVNALSKRLIMTIKKEGQIYRQEFEKGIPISELEIIGKTKSAKESGTTIEFFPDESVMEVVEFQAGILQKRFKEMAYLNDGLKISFKEEKTQLQETYFYKDGLKQFVKDSAKKELLTPIIAFKSMDEETRTSIEVALAYADDYNENTLSFVNNIKTSEGGTHEAGFKMGLSKAILQYIDNNIKTKESRPISEDIKEGLIAVVSLKMSEPLFEGQTKSKLGSSYARALVSKLVYDKIHQFLEENPNEAKIIANKALLAAKAREASKKARELTRKKDNLSVGTLPGKLADCQSKDPLESEIFLVEGDSAGGSAKQGRDRVFQAILPLKGKILNVEKSHLSKILKSEEIKNMITAFGCGIQESFDIERLRYHKIIIMTDADVDGSHIQTLLMTFFYRYLRPLIEQGHVFIAQAPLYKYKKGKTEIYLKDSVALDHFLIEHGINSVDIEGIGKNDLMNLLKVARHYRYTLLELEKRYNLLEVLRFLIETKDALSLDMKVLEKSILEKLEGLNYQILRSFATEESLHLHAQTPKGLVEFNLDDNLFKDVLFEEAHYTYQKLMEYNLDFLENKDILAFLEEVENYAKKGANIQRYKGLGEMNPNDLWETTMHKENRSLIKLKIEDLEKTDAVFSLCMGDEVEPRRAFIQAHAKDVKQLDV

SEQ ID NO: 7241 - protein, 351 aa, Helicobacter pylori
  misc_feature (B) LOCATION 1...351
  hypothetical: YES
LYKVADIFCGAGGLSYGFSTHPYFELIWANDIDKDAILSYQANHKETQTILCDIAQLHCHNLPRVPIDILLGGPPCQSYSTLGKRKMDEKANLFKEYLRILDLVKPKIFVFENVVGLMSMQKGQLFQRICNAFKERGYILEHAILNALDYGVPQVRERVILVGALKSFKQKFYFPKPIKTHFSLKDALGDLPPIQSGENGDALGYLKNADNVFLEFVRNSKELSEHSSPKNNEKLIKIMQTLKDGQSKDDLPESLRPKSGYINTYAKMWWEKPAPTITRNFSTPSSSRCIHPRDSRALSIREGARLQSFPDNYKFYGSANAKRLQIGNAVPPLLSAALAHAVFDFLRGKNV

SEQ ID NO: 7242 - protein, 352 aa, Helicobacter pylori
  misc_feature (B) LOCATION 1...352
  hypothetical: YES
NLYKVADIFCGAGGLSYGFSTHPYFELIWANDIDKDAILSYQANHKETQTILCDIAQLHCHNLPRVPIDILLGGPPCQSYSTLGKRKMDEKANLFKEYLRILDLVKPKIFVFENVVGLMSMQKGQLFQRICNAFKERGYILEHAILNALDYGVPQVRERVILVGALKSFKQKFYFPKPIKTHFSLKDALGDLPPIQSGENGDALGYLKNADNVFLEFVRNSKELSEHSSPKNNEKLIKIMQTLKDGQSKDDLPESLRPKSGYINTYAKMWWEKPAPTITRNFSTPSSSRCIHPRDSRALSIREGARLQSFPDNYKFYGSANAKRLQIGNAVPPLLSAALAHAVFDFLRGKNV

SEQ ID NO: 7243 - protein, 309 aa, Helicobacter pylori
  misc_feature (B) LOCATION 1...309
  hypothetical: YES
MHANLFNQNASKKDIFLHNLRSNNGRYKRYVKAPLRYGGGKSLAVGLIVECIPNGVRRVISPFIGGGSVEIACATELGLEVLGFDIFDILVNFYQALLKDKQALYDNLFSLEPNQETYSIIKQELKAHYKKECVLDPLILARDYYFNFNLSYGPGFLGWMSKIYTDKQRYLNTLLKIKDFNAPSLKVECSSFEEVLIAYPNDFFYLDPSYVLENSKMFKGIYPMRNFPIHHNGFKHEVLAHMLKRHKGPFILSYNDCELVRNAYKDFKILEPSWQYTMGQGETRMGKNRLERGDNNHVKQSHELLIIKE

SEQ ID NO: 7244 - protein, 314 aa, Helicobacter pylori
  misc_feature (B) LOCATION 1...314
  hypothetical: YES
IEFFGMHANLFNQNASKKDIFLHNLRSNNGRYKRYVKAPLRYGGGKSLAVGLIVECIPNGVRRVISPFIGGGSVEIACATELGLEVLGFDIFDILVNFYQALLKDKQALYDNLFSLEPNQETYSIIKQELKAHYKKECVLDPLILARDYYFNFNLSYGPGFLGWMSKIYTDKQRYLNTLLKIKDFNAPSLKVECSSFEEVLIAYPNDFFYLDPSYVLENSKMFKGIYPMRNFPIHHNGFKHEVLAHMLKRHKGPFILSYNDCELVRNAYKDFKILEPSWQYTMGQGETRMGKNRLERGDNNHVKQSHELLIIKE

SEQ ID NO: 7245 - protein, 91 aa, Helicobacter pylori
  misc_feature (B) LOCATION 1...91
  hypothetical: YES
KKTRLFESLDSEHSETAKTSVEIEKGLDIEKAFHLGVNAKFFLEALNALGTTQFVLKCNEPSSPFLIQEPLDEKQSHLNAKISTLMMPITL

SEQ ID NO: 7246 - protein, 105 aa, Helicobacter pylori
  misc_feature (B) LOCATION 1...105
  hypothetical: YES
LCSSLSSTIKLTLEKNNALFESLDSEHSETAKTSVEIEKGLDIEKAFHLGVNAKFFLEALNALGTTQFVLKCNEPSSPFLIQEPLDEKQSHLNAKISTLMMPITL

SEQ ID NO: 7247 - protein, 264 aa, Helicobacter pylori
  misc_feature (B) LOCATION 1...264
  hypothetical: YES
MKISVSKNDLENTLRYLQAFLDKKDASSIASHIHLEVIKEKLFLKASDSDIGLKSYISTQSTDKEGVGTINGKKFLDIISCLKDSNIVLETKDDSLVIKQNKSSFKLPMFDADEFPEFPVIDPKVSLEINAPFLVDAFKKIAPVIEQTSHKRELAGVLMQFNQKHQTLSVVGTDTKRLSYTQLEKISIHSTEEDISCILPKRALLEILKLFYENFSFKSDGMLAVVENETHAFFTKLIDGNYPDYQKILPKEYTSSFTLGKEEF

SEQ ID NO: 7248 - protein, 268 aa, Helicobacter pylori
  misc_feature (B) LOCATION 1...268
  hypothetical: YES
DQKFKGIILAMKISVSKNDLENTLRYLQAFLDKKDASSIASHIHLEVIKEKLFLKASDSDIGLKSYISTQSTDKEGVGTINGKKFLDIISCLKDSNIVLETKDDSLVIKQNKSSFKLPMFDADEFPEFPVIDPKVSLEINAPFLVDAFKKIAPVIEQTSHKRELAGVLMQFNQKHQTLSVVGTDTKRLSYTQLEKISIHSTEEDISCILPKRALLEILKLFYENFSFKSDGMLAVVENETHAFFTKLIDGNYPDYQKILPKEYTSLSL

SEQ ID NO: 7249 - protein, 374 aa, Helicobacter pylori
  misc_feature (B) LOCATION 1...374
  hypothetical: YES
MKISVSKNDLENTLRYLQAFLDKKDASSIASHIHLEVIKEKLFLKASDSDIGLKSYISTQSTDKEGVGTINGKKFLDIISCLKDSNIVLETKDDSLVIKQNKSSFKLPMFDADEFPEFPVIDPKVSLEINAPFLVDAFKKIAPVIEQTSHKRELAGVLMQFNQKHQTLSVVGTDTKRLSYTQLEKISIHSTEEDISCILPKRALLEILKLFYENFSFKSDGMLAVVENETHAFFTKLIDGNYPDYQKILPKEYTSSFTLGKEEFKEGIKLCSSLSSTIKLTLEKNNALFESLDSEHSETAKTSVEIEKGLDIEKAFHLGVNAKFFLEALNALGTTQFVLKCNEPSSPFLIQEPLDEKQSHLNAKISTLMMPITL

SEQ ID NO: 7250 - protein, 67 aa, Helicobacter pylori
  misc_feature (B) LOCATION 1...67
  hypothetical: YES
LHKTLFKEYPKAFNVLNILIAVRDKDDIVRDANGNFYPLYSYFENDEKVYEFIRQYGVGANFLQQRH

SEQ ID NO: 7251 - protein, 68 aa, Helicobacter pylori
  misc_feature (B) LOCATION 1...68
  hypothetical: YES
KLHKTLFKEYPKAFNVLNILIAVRDKDDIVRDANGNFYPLYSYFENDEKVYEFIRQYGVGANFLQQRH

SEQ ID NO: 7252 - protein, 277 aa, Helicobacter pylori
  misc_feature (B) LOCATION 1...277
  hypothetical: YES
MIIAHSNEIAHPIFKSADKLFTLYQGDCNEVLPQFENAFDLIFADPPYFLSNDGLSIQSGKIVSVNKGDWDKENGINDIDEFNYQWINNAKKALKNTGSLLISGTYHNLFSLGRILQKLDFKILNLITWQKTNPPPNFSCRYLTHSAEQIIWARKSYKHKHVFNYEILKKINNNKQMRDVWNFPAIAPWEKANGKHPTQKPLALLVRLLLMASDDNSLIGDPFSGSSTTGIAANLLKREFIGIEKESRFIKISMNRKLELDARHQEIRSKIKDLNFQ

SEQ ID NO: 7253 - protein, 284 aa, Helicobacter pylori
  misc_feature (B) LOCATION 1...284
  hypothetical: YES
FYIKGAKMIIAHSNEIAHPIFKSADKLFTLYQGDCNEVLPQFENAFDLIFADPPYFLSNDGLSIQSGKIVSVNKGDWDKENGINDIDEFNYQWINNAKKALKNTGSLLISGTYHNLFSLGRILQKLDFKILNLITWQKTNPPPNFSCRYLTHSAEQIIWARKSYKHKHVFNYEILKKINNNKQMRDVWNFPAIAPWEKANGKHPTQKPLALLVRLLLMASDDNSLIGDPFSGSSTTGIAANLLKREFIGIEKESRFIKISMNRKLELDARHQEIRSKIKDLNFQ

SEQ ID NO: 7254 - protein, 72 aa, Helicobacter pylori
  misc_feature (B) LOCATION 1...72
  hypothetical: YES
MKNHLPFDTFLKSLKTSNRTLDFFTDWQKCLKNKNEISIALNHLNFLLGKDTKELKNCIKPFLKNTPKLLMF

SEQ ID NO: 7255 - protein, 76 aa, Helicobacter pylori
  misc_feature (B) LOCATION 1...76
  hypothetical: YES
NGVKMKNHLPFDTFLKSLKTSNRTLDFFTDWQKCLKNKNEISIALNHLNFLLGKDTKELKNCIKPFLKNTPKLLMF

SEQ ID NO: 7256 - protein, 93 aa, Helicobacter pylori
  misc_feature (B) LOCATION 1...93
  hypothetical: YES
MILKNLILLFLAKRKLIFIEANFYTISGSKLNEVARSYQDLALKFEAFPNYEFIWITDGIGWLDAKSKLQEAYKSVEIYNLSYVNDFISKVQK

SEQ ID NO: 7257 - protein, 102 aa, Helicobacter pylori
  misc_feature (B) LOCATION 1...102
  hypothetical: YES
LRIYARLLEMILKNLILLFLAKRKLIFIEANFYTISGSKLNEVARSYQDLALKFEAFPNYEFIWITDGIGWLDAKSKLQEAYKSVEIYNLSYVNDFISKVQK

SEQ ID NO: 7258 - protein, 106 aa, Helicobacter pylori
  misc_feature (B) LOCATION 1...106
  hypothetical: YES
ILENLRIYARLLEMILKNLILLFLAKRKLIFIEANFYTISGSKLNEVARSYQDLALKFEAFPNYEFIWITDGIGWLDAKSKLQEAYKSVEIYNLSYVNDFISKVQK

SEQ ID NO: 7259 - protein, 274 aa, Helicobacter pylori
  misc_feature (B) LOCATION 1...274
  hypothetical: YES
LLIESMGSYFMECPMKKKANEEKAPKRAKQEAKTEATQENKAKESNKENKNNKAKEGKIKEAKTKESKVKETAKEPIPVKKLSFNEAFVELFANSLSDCVSYESIIQISAKVPTLAQIKKIKELCQKYQKKLVSSSEYAKKLNAIDKIKNTEEKQKVLDEELEDGYDFLKEKDFLEWSRSDSPVRMYLREMGDIKLLSKDEEIELSKQIRLGEDIILDAICSVPYLIDFIYAYKDALINRERRVKELFRSFDDDDDYNVSDPALYDYRADEQDH

SEQ ID NO: 7260 - protein, 326 aa, Helicobacter pylori
  misc_feature (B) LOCATION 1...326
  hypothetical: YES
NAWKYKLPLFNDTLIANHKKILANITNMTKEDIIAQVPEATMVSVYMDLKKLFLTKEASEEGFDLAPNKLKEILEQIKRGKLISDRAKNKMAKSNLRLVVSIAKRFTSRGLPFLDLIQEGNIGLMKAVDKFEHEKGFKFSTYATWWIKQAISRAIADQARTIRIPIHMIDTINRINKVMRKHIQETGKEPDLEVVAEEVGLSLDKVKNVIKVTKEPISLETPVDNDDDGKFGDFVEDKNIVSSIDHIMREDLKAQIESVLDQLNEREKAVIRMRFGLLDDESDRTLEEIGKELNVTRERVRQIESSAIKKLRSPQYGRILRNYLRI

SEQ ID NO: 7261 - protein, 681 aa, Helicobacter pylori
  misc_feature (B) LOCATION 1...681
  hypothetical: YES
MKKKANEEKAPKRAKQEAKTEATQENKAKESNKENKNNKAKEGKIKEAKTKESKVKETAKEPIPVKKLSFNEALEELFANSLSDCVSYESIIQISAKVPTLAQIKKIKELCQKYQKKLVSSSEYAKKLNAIDKIKNTEEKQKVLDEELEDGYDFLKEKDFLEWSRSDSPVRMYLREMGDIKLLSKDEEIELSKQIRLGEDIILDAICSVPYLIDFIYAYKDALINRERRVKELFRSFDDDDENSVSDPKKDDDSEEDEENEERKKVVSEKDKKRVEKVQESFKALDKAKKEWLKALEAPIDEKEDELVRSLTLAYKRQTLKDRLYDLEPTSKLINELVKTMETTLKSGDGFEKELKRLEYKLPLFNDTLIANHKKILANITNMTKEDIIAQVPEATMVSVYMDLKKLFLTKEASEEGFDLAPNKLKEILEQIKRGKLISDRAKNKMAKSNLRLVVSIAKRFTSRGLPFLDLIQEGNIGLMKAVDKFEHEKGFKFSTYATWWIKQAISRAIADQARTIRIPIHMIDTINRINKVMRKHIQETGKEPDLEVVAEEVGLSLDKVKNVIKVTKEPISLETPVGNDDDGKFGDFVEDKNIVSSIDHIMREDLKAQIESVLDQLNEREKAVIRMRFGLLDDESDRTLEEIGKELNVTRERVRQIESSAIKKLRSPQYGRILRNYLRI

SEQ ID NO: 7262 - protein, 181 aa, Helicobacter pylori
  misc_feature (B) LOCATION 1...181
  hypothetical: YES
ITMLKRIKVGSDLNKKESLLDAFVKTYLQTLEPISSKRLKELANLKVSCATIRNYFQILSKEGMLHQTHSNGARLPTFKAFENYWHKSLRFEVLKVNEKRLKSASENFGLFTLLKKPSLERLERVIECEKRFLILDFLAFSCAVGYSVKMEKFLLELVGRSVKEVRLIAASVNAFEVWPGN

SEQ ID NO: 7263 - protein, 266 aa, Helicobacter pylori
  misc_feature (B) LOCATION 1...266
  hypothetical: YES
MLKRIKVGSDLNKKESLLDAFVKTYLQTLEPISSKRLKELANLKVSCATIRNYFQILSKEGMLHQAHSSGARLPTFKAFENYWHKSLRFEVLKVNEKRLKSASENFGLFTLLKKPSLERLERVIECEKRFLILDFLAFSCAVGYSVKMEKFLLELVGRSVKEVRLIAASVNALSLARQLERLEYSSAQITRFNLMGLKTLLNSPLFFDILEGKVLERFKKGLHFIEPDCMLVTRPIEFQNERMQLLCVGKLECDYEGFFQTISKEE

SEQ ID NO: 7264 - protein, 752 aa, Helicobacter pylori
  misc_feature (B) LOCATION 1...752
  hypothetical: YES
MFASLNVLKELQKHYENNPKDPLKGIIWHTQGSGKTALTYHLTKLIRDFFSPLGKKTKFYFIVDRLDLLEQAKNEFLKRGLCAHEAENKEDLSQKLKSSSVFENPQGNDEIIVVNIQKFKAPNEDPSNSAPKEIISKTELQESIQNSRNLQRVFIIDEAHRSYDPKGCFYANLIECDKTAVKIALTGTPLLEDNAQDKATKNTFGNYLHTYSYAESIKDRHTLKLQLEIIEKSYKEKLQAIYRLLQESITIEDVEVKKEMIFNHEKYIKEMLYYIIRDLLNFRRVNNDENLKAMVVCFSSAQAKLANWLFNEVQERVLQENPNLRILKKLQSSLILHDEQEVKEKIYSFKHKDTDIVFVFNMLLTGFDLPNLKRLYIHRELKDHNLLQALARVNRPYNNMPFGYLIDFVGIKENYDKTTDDYLKELNQFNQSDFNIKDNLKDMFADREVLEKDIKNAYDDLFNYPIDDVEDMTSAIVGISEMNELLKVSRAINTLKERYNLIRTSSDEKILSLKEKIDIEKISKISSMLSKKAKQLHALKNINEPKNPNDLMILEDLIALLDFKIDFKESKELHFKEREEINAKYKQAKEMLEKIPDKQDKEVQKISKELSKLIQEPLTNDNFDGISHSYSAIISQLEQHKEQTTNLLNKYNNDRAYVITHKRLHNRLMEENISKGIFTLLSALKKAIDERIFKRQEILNEEDTLKTAIKVELRDAFNKNPSLKDLEKETEFIAQTLFNELTQNHHQGNLNA

SEQ ID NO: 7265 - protein, 849 aa, Helicobacter pylori
  misc_feature (B) LOCATION 1...849
  hypothetical: YES
ARYYPPPENHQNHQNHQNHQNHQNHQNHKSLEEIQESVLNEFNLKNTDCPKSPKDTPTNALLTSFCSPKRLCFILKYGISFLKEKSEFKKHIWRYAQMFASLNVLKELQKHYENNPKDPLKGIIWHTQGSGKTALTYHLTKLIRDFFSPLGKKTKFYFIVDRLDLLEQAKNEFLKRGLCAHEAENKEDLSQKLKSSSVFENPQGNDEIIVVNIQKFKAPNEDPSNSAPKEIISKTELQESIQNSRNLQRVFIIDEAHRSYDPKGCFYANLIECDKTAVKIALTGTPLLEDNAQDKATKNTFGNYLHTYSYAESIKDRHTLKLQLEIIEKSYKEKLQAIYRLLQESITIEDVEVKKEMIFNHEKYIKEMLYYIIRDLLNFRRVNNDENLKAMVVCFSSAQAKLANWLFNEVQERVLQENPNLRILKKLQSSLILHDEQEVKEKIYSFKHKDTDIVFVFNMLLTGFDLPNLKRLYIHRELKDHNLLQALARVNRPYNNMPFGYLIDFVGIKENYDKTTDDYLKELNQFNQSDFNIKDNLKDMFADREVLEKDIKNAYDDLFNYPIDDVEDMTSAIVGISEMNELLKVSRAINTLKERYNLIRTSSDEKILSLKEKIDIEKISKISSMLSKKAKQLHALKNINEPKNPNDLMILEDLIALLDFKIDFKESKELHFKEREEINAKYKQAKEMLEKIPDKQDKEVQKISKELSKLIQEPLTNDNFDGISHSYSAIISQLEQHKEQTTNLLNKYNNDRAYVITHKRLHNRLMEENISKGIFTLLSALKKAIDERIFKRQEILNEEDTLKTAIKVELRDAFNKNPSLKDLEKETEFIAQTLFNELTQNHHQGNLNA

SEQ ID NO: 7266 - protein, 849 aa, Helicobacter pylori; identical to SEQ ID NO: 7265
  misc_feature (B) LOCATION 1...849
  hypothetical: YES

SEQ ID NO: 7267 - protein, 152 aa, Helicobacter pylori
  misc_feature (B) LOCATION 1...152
  hypothetical: YES
MDEXLVYGVICMPSQVFANTGTNVSIIFFQKTPSAKEVILIDASKLGEEYTENKNKKTRLRPSDMDLILETFQNKAPKSDFCALVSFDEITEKNYSLNPGQYFTIEDTSETISQAEFENLMQQYSSELASLFDESQNLQQEILETLKGVRFE

SEQ ID NO: 7268 - protein, 543 aa, Helicobacter pylori
  misc_feature (B) LOCATION 1...543
  hypothetical: YES
MPNNALLQIKQDTLSLIDDLKVICKDAGLAGDGNGYKIITQCFLYKFLCDKFEFFFEQKFPNKTIRDYKDFNEEEKEYFFLTLSDKKLPKLAYDELLNYLFEKHFYDNDLHLKLDAIFNRISSNNAELFNTKSTDETTIALFESVSQYINEGSKRANFTRSLLDKLKNFNFKQAFLNLQNQQGYDFFAPIFEYLLKDYNNNSGGTYAEYYTPLSIASIIAKLLVNKPTQSVKIYDPSAGTGTLLMALAHQIGTDSCTLYAQDISQKSLRMLKLNLILNDLTHSLRHAIEGNTLTNPYHSKDHKGKMDFIVSNPPFKLDFSNEHAEISQNKNDFFLGVPNIPKNDKSKMPIYTLFFQHCLNMLSPKGKGAIIVPTGFISAKSGVENKIVRHLVDERLVYGVICMPSQVFANTGTNVSIIFFQKTPSAKEVILIDASKLGEEYTENKNKKTRLRPSDMDLILETFQNKAPKSDFCALVSFDEITEKNYSLNPGQYFTIEDTSETISQAEFENLMQQYSSELASLFDESQNLQQEILETLKGVRFE

SEQ ID NO: 7269 - protein, 543 aa, Helicobacter pylori
  misc_feature (B) LOCATION 1...543
  hypothetical: YES
MPNNALLQIKQDTLSLIDDLKVICKDAGLAGDGNGYKIITQCFLYKFLCDKFEFFFEQKFPNKTIRDYKDFNEEEKEYFFLTLSDKKLPKLAYDELLNYLFEKHFYDNDLHLKLDAIFNRISSNNAELFNTKSTDETTIALFESVSQYINEGSKRANFTRSLLDKLKNFNFKQAFLNLQNQQGYDFFAPIFEYLLKDYNNNSGGTYAEYYTPLSIASIIAKLLVNKPTQSVKIYDPSAGTGTLLMALAHQIGTDSCTLYAQDISQKSLRMLKLNLILNDLTHSLRHAIEGNTLTNPYHSKDHKGKMDFIVSNPPFKLDFSNEHAEISQNKNDFFLGVPNIPKNDKSKMPIYTLFFQHCLNMLSPKGKGAIIVPTGFISAKSGVNNKNVRHLVDERLVYGVICMPSQVFANTGTNVSIIFFQKTPSAKEVILIDASKLGEEYTENKNKKTRLRPSDMDLILETFQNKAPKSDFCALVSFDEITEKNYSLNPGQYFTIEDTSETISQAEFENLMQQYSSELASLFDESQNLQQEILETLKGVRFE

SEQ ID NO: 7270 - protein, 303 aa, Helicobacter pylori
  misc_feature (B) LOCATION 1...303
  hypothetical: YES
MPSNALSVGEIAHLINVSHSSVHNWIKTNLLEKLEIDHKIYVKTSSFLDFCRNHLGKNKLNRYANKSLKSAHNHQELILKYLEMLENSSDLENLGSYYEKELSNTTRNLEGIYYTPNRIVEQLFTLPKDFDTTQAIFCDPAVGSGNFVMHALKLGFKVENIYGYDTDAFAVALTKKRIKERYRLDCPNIMQKDFLSLKHAPQFDCIFTNPPWGKKYNQNQKENFKQQFNLHQSLDSASLFFMASLNCLKENAYLGLLLPESCLNIDAFSKMREMALKFQMRSLIDFDKPFKNLMTKAVGLALK

SEQ ID NO: 7271 - protein, 545 aa, Helicobacter pylori
  misc_feature (B) LOCATION 1...545
  hypothetical: YES
MPSNALSVGEIAHLINVSHSSVHNWIKTNLLEKLEIDHKIYVKTSSFLDFCRNHLGKNKLNRYANKSLKSAHNHQELILKYLEMLENSSDLENLGSYYEKELSNTTRNLEGIYYTPNRIVEQLFTLPKDFDTTQAIFCDPAVGSGNFVMHALKLGFKVENIYGYDTDAFAVALTKKRIKERYRLDCPNIMQKDFLSLKHAPQFDCIFTNPPWGKKYNQNQKENFKQQFNLHQSLDSASLFFMASLNCLKENAYLGLLLPESCLNIDAFSKMREMALKFQMRSLIDFDKPFKNLMTKAVGLALKKTHNKDQKISCFYQNSEFKRSPSSFFNNPKKIFNIHCSHQKNKILDHLFSLPHITLKNNAHFALGIVTGNNKEKLHPKQEKNTIPIFRGSDILKDRLKAPSQFINADLKDCQQVAPLSLYQAREKIVYKFISSKLVFFYDNKQRLFLNSANMFVLKENFPINAHALKELLNSDLMQFIFESLFKTHKILRKDLECLPLFAQFINNSFDEKFYLKNLGIEKKDPKHFTIRKNHACCLSFGFRG

SEQ ID NO: 7272 - protein, 550 aa, Helicobacter pylori
  misc_feature (B) LOCATION 1...550
  hypothetical: YES
FLGGKMPSNALSVGEIAHLINVSHSSVHNWIKTNLLEKLEIDHKIYVKTSSFLDFCRNHLGKNKLNRYANKSLKSAHNHQELILKYLEMLENSSDLENLGSYYEKELSNTTRNLEGIYYTPNRIVEQLFTLPKDFDTTQAIFCDPAVGSGNFVMHALKLGFKVENIYGYDTDAFAVALTKKRIKERYRLDCPNIMQKDFLSLKHAPQFDCIFTNRPWGKKYNQNQKENFKQQFNLHQSLDSASLFFMASLNCLKENAYLGLLLPESCLNIDAFSKMREMALKFQMRSLIDFDKPFKNLMTKAVGLALKKTHNKDQKISCFYQNSEFKRSPSSFFNNPKKIFNIHCSHQKNKILDHLFSLPHITLKNNAHFALGIVTGNNKEKLHPKQEKNTIPIFRGSDILKDRLKAPSQFINADLKDCQQVAPLSLYQAREKIVYKFISSKLVFFYDNKQRLFLNSANMFVLKENFPINAHALKELLNSDLMQFIFESLFKTHKILRKDLECLPLFAQFINNSFDEKFYLKNLGIEKKDPKHFTIRKNHACCLSFGFRG

SEQ ID NO: 7273 - protein, 238 aa, Helicobacter pylori
  misc_feature (B) LOCATION 1...238
  hypothetical: YES
VCMPYNEITRVQVPALMHLAELGYNFIPQKNKPNLDTATNILTNSFTQSFERLNPTKNAKDALAEMKKRLNYDDLGRSFYEYLLKSEYQIIDFDNPNNNLYEMMTELPYQSLRTDITLFINGLPLVNIEVKQPYAKKGITEEKVRHIQRYENPENKVFYNLAQIWLFSDNLPYDENNPDQGAFYSASYSPIFQRFVEANKLDITPPPKIIKIIKIIKIIKIIKIIKTTNRLKKFKKAS

SEQ ID NO: 7274 - protein, 241 aa, Helicobacter pylori
  misc_feature (B) LOCATION 1...241
  hypothetical: YES
IKGVCMPYNEITRVQVPALMHLAELGYNFIPQKNKPNLDTATNILTNSFTQSFERLNPTKNAKDALAEMKKRLNYDDLGRSFYEYLLKSEYQIIDFDNPNNNLYEMMTELPYQSLRTDITLFINGLPLVNIEVKQPYAKKGITEEKVRHIQRYENPENKVFYNLAQIWLFSDNLPYDENNPDQGAFYSASYSPIFQRFVEANKLDITPPPKIIKIIKIIKIIKIIKIIKTTNRLKKFKKAS

SEQ ID NO: 7275 - protein, 686 aa, Helicobacter pylori
  misc_feature (B) LOCATION 1...686
  hypothetical: YES
MNNSVIIIESPNKVAKIREITGAKVFATIGHFMQLKSYDENNGFKPTFDYDQEKKKHIFEMIEACKNKKVYIATDPDREGYAIGYMFYQKIKNVASSIYRAEFFEITPSGINKGLQNALLFENTNRQMYQSALARRVADMLLGFTLSPYLGKALGQMKGSSAGRVQTPCLKLIVDRDREIEKFKALPENEKVSYQIQAKINDSANREVTIKHCDEKGEEIKFNDKEEALKLFESLKDNKACLLKDLKNSVVETKPKKPFITSTLLEKASSMLGLSISEVQSLAQNLFEAGLITYIRTDAESLSVEFLDETESFYAPIYKDLYLKREYKAGKQSQAEAHEAIRITHPHTTEDLESIVYNANITNQDALKLYQLIFERTIESQGKNAIYDKQDLLFKIKNEYFKCSVKGLKSAGFLAMFSKKELENDESNDDKDNKEKEQNAQFNLKIDDVLSLNDLVLSTIKRNAPSAYKEADFVKLLENKGIGRPSTYASYLPTLVKREYISISQDKKHIITPTHKGKRVVEVFENAYQFIIDLTYTKQMEEVLDEIVENKSSYVDFISNLNSKCPKIEKLERNDDEIKPSSEGQITYIENILRDLQLNLSEEFKNYKEDNRVAKAFLDRYIKEHEFFKKNNKKASSSNNDENRPATPKQISFAEILAKKHNVKLPKGFKYSMKVCGDFINEYHKK

SEQ ID NO: 7276 - protein, 690 aa, Helicobacter pylori
  misc_feature (B) LOCATION 1...690
  hypothetical: YES
RSNQMNNSVIIIESPNKVAKIREITGAKVFATIGHFMQLKSYDENNGFKPTFDYDQEKKKHIFEMIEACKNKKVYIATDPDREGYAIGYMFYQKIKNVASSIYRAEFFEITPSGINKGLQNALLFENTNRQMYQSALARRVADMLLGFTLSPYLGKALGQMKGSSAGRVQTPCLKLIVDRDREIEKFKALPENEKVSYQIQAKINDSANREVTIKHCDEKGEEIKFNDKEEALKLFESLKDNKACLLKDLKNSVVETKPKKPFITSTLLEKASSMLGLSISEVQSLAQNLFEAGLITYIRTDAESLSVEFLDETESFYAPIYKDLYLKREYKAGKQSQAEAHEAIRITHPHTTEDLESIVYNANITNQDALKLYQLIFERTIESQGKNAIYDKQDLLFKIKNEYFKCSVKGLKSAGFLAMFSKKELENDESNDDKDNKEKEQNAQFNLKIDDVLSLNDLVLSTIKRNAPSAYKEADFVKLLENKGIGRPSTYASYLPTLVKREYISISQDKKHIITPTHKGKRVVEVFENAYQFIIDLTYTKQMEEVLDEIVENKSSYVDFISNLNSKCPKIEKLERNDDEIKPSSEGQITYIENILRDLQLNLSEEFKNYKEDNRVAKAFLDRYIKEHEFFKKNNKKASSSNNDENRPATPKQISFAEILAKKHNVKLPKGFKYSMKVCGDFINEYHKK

SEQ ID NO: 7277 - protein, 425 aa, Helicobacter pylori
  misc_feature (B) LOCATION 1...425
  hypothetical: YES
MYKNCVFIIESPNKIAKIKELTGSSFVFATGGHFVELVNIEVNKEFNPIFEIKKSTDKKKDRSTHINHMINQCKDKVVYIATDPDREGYGIGYKFYEKIKNLAKTIYRTEFHEITKSGVEKGLNNAGLFSQSNLNLYYSWLGRIVSDQFIGFTLTPYLRKNIKNFEVGAGRVQTPALSILVELDRKIQAFEQKNNDEKLSYSIEAIIDALGSQISITLVEENKRKAFETKELAQNFLNDLKNNLNPLAFLDAIEQKDKEKAPPKPFTTSNLLKDGARILGMGVKQIQEHAQKLFEAGLITYIRTDSEALSKEYLQEHEAFFEGIYPSVYEYREYRAGKNSQAEAHEAIRITHPHCYEDLKKVCEEHNITDIDDLKVYTLIFFNTICSQSKNAIYENTVLNFKVKTHRFNAVLANSNLKVLKRLKT

SEQ ID NO: 7278 - protein, 437 aa, Helicobacter pylori
  misc_feature (B) LOCATION 1...437
  hypothetical: YES
KLKLKKKARKFNMYKNCVFIIESPNKIAKIKELTGSSFVFATGGHFVELVNIEVNKEFNPIFEIKKSTDKKKDRSTHINHMINQCKDKVVYIATDPDREGYGIGYKFYEKIKNLAKTIYRTEFHEITKSGVEKGLNNAGLFSQSNLNLYYSWLGRIVSDQFIGFTLTPYLRKNIKNFEVGAGRVQTPALSILVELDRKIQAFEQKNNDEKLSYSIEAIIDALGSQISITLVEENKRKAFETKELAQNFLNDLKNNLNPLAFLDAIEQKDKEKAPPKPFTTSNLLKDGARILGMGVKQIQEHAQKLFEAGLITYIRTDSEALSKEYLQEHEAFFEGIYPSVYEYREYRAGKNSQAEAHEAIRITHPHCYEDLKKVCEEHNITDIDDLKVYTLIFFNTICSQSKNAIYENTVLNFKVKTHRFNAVLANSNLKVLKRLKT

SEQ ID NO: 7279 - protein, 98 aa, Helicobacter pylori
  misc_feature (B) LOCATION 1...98
  hypothetical: YES
LETLHNALLKWYEEFGRKDLPFRNLKGINAPYEVYISEVMSQQTQISTVIERFYPPFLKAFPTLKDLANAPLEEVLLLWRGLGYYSRAKNLKKALKFA

SEQ ID NO: 7280 - protein, 98 aa, Helicobacter pylori; identical to SEQ ID NO: 7279
  misc_feature (B) LOCATION 1...98
  hypothetical: YES

SEQ ID NO: 7281 - protein, 60 aa, Helicobacter pylori
  misc_feature (B) LOCATION 1...60
  hypothetical: YES
GTIKHSHTKFKLNLNLYLATTKDLKNPIRFYSLKDLETLPISSMTLKILNFLKQKNLFGG

SEQ ID NO: 7282 - protein, 187 aa, Helicobacter pylori
  misc_feature (B) LOCATION 1...187
  hypothetical: YES
KFKKSAEICVKEHHSQLPNDYQSLLKLPGIGAYTANAILCFGFREKSACVDANVKRVLLRLFGLDPNIHAKDLQIKANDFLNLNESFNHNQALIDLGALICSPKPKCAICPFNPYCLGKNHLERHTLKKKQEIIQEERYLGVVIQNNQIALEKIEQKLYLGMHHFPNLKENLEFKLPFLGHYQAQPH

SEQ ID NO: 7283 - protein, 230 aa, Helicobacter pylori
  misc_feature (B) LOCATION 1...230
  hypothetical: YES
VKEHHSQLPNDYQSLLKLPGIGAYTANAILCFGFREKSACVDANVKRVLLRLFGLDPNIHAKDLQIKANDFLNLNESFNHNQALIDLGALICSPKPKCAICPFNPYCLGKNHLERHTLKKKQEIIQEERYLGVVIQNNQIALEKIEQKLYLGMHHFPNLKENLEFKLPFLGTIKHSHTKFKLNLNLYLATTKDLKNPIRFYSLKDLETLPISSMTLKILNFLKQKNLFGG

SEQ ID NO: 7284 - protein, 214 aa, Helicobacter pylori
  misc_feature (B) LOCATION 1...214
  hypothetical: YES
CMSNVLISFVGGQGAKRLLYILYKLAFNAKSNKIALDRHYAKMFLQIVARTLTKNVNILEEQGFIEVIKGKQRYLYVYLKDYRELEGYNSVGANKKNNIPSPFFLQIMSFLKKSTKDIERVKINNKECVMHIPSQELMQRVNNVVLKFTPISNPNTTYTLSYKDLTNKDIPSNLCFYQTAIVKKNLLKALKDKECVGEPIKNSPKVSDYFQESA

SEQ ID NO: 7285 - protein, 213 aa, Helicobacter pylori
  misc_feature (B) LOCATION 1...213
  hypothetical: YES
MSNVLISFVGGQGAKRLLYILYKLAFNAKSNKIALDRHYAKMFLQIVARTLTKNVNILEEQGFIEVIKGKQRYLYVYLKDYRELEGYNSVGANKKNNIPSPFFLQIMSFLKKSTKDIERVKINNKECVMHIPSQELMQRVNNVVLKFTPISNPNTTYTLSYKDLTNKDIPSNLCFYQTAIVKKNLLKALKDKECVGEPIKNSPKVSDYFQESA

SEQ ID NO: 7286 - protein, 246 aa, Helicobacter pylori
  misc_feature (B) LOCATION 1...246
  hypothetical: YES
FLSLSLIERDLKTMAKILKPNLDRDELNTLYKANLAYAKNTHEHYFKFEKDLDYKLFNPSIMHEQCSISFVGGQGAKRLLYILYKLAFNAKSNKIALDRHYAKMFLQVVARTLIKNVNILEEQGFIEVIKGKQRYLYVYLKDYRELEGYNSVGANQKNNIPSPFFLQIMRFLKKFAKDIERVKINNKECVMHIPSQELMQRVNNVVLKFTPISNPNTTYTLSYKDLTNKDIPSNFCFYQTAISFYA

SEQ ID NO: 7287 - protein, 299 aa, Helicobacter pylori
  misc_feature (B) LOCATION 1...299
  hypothetical: YES
MAKILKPNLDRDELNTLYKANLAYAKNTHEHYFKFKKDLDYKLFNPSIMHEQCSISFVGGQGAKRLLYILYKLAFNAKSNKIALDRHYAKMFLQVVARTLIKNVNILEEQGFIEVIKGKQRYLYVYLKDYRELECLVKSKMAKYVMYLRQFFDYLDRKRRYGFDFTLKNLAFAKTKESLPRHLNDKDLKSFLKTLLDYKPATSFEKRNKCILLIVILGGLRKCEVLNIELKHIQVEEQNYSILIQGKGRKERKAYIKKSLLEPSLNAWISDDYRLKYFNGAYLFKKDKQKSQNSLTLYN

SEQ ID NO: 7288 - protein, 582 aa, Helicobacter pylori
  misc_feature (B) LOCATION 1...582
  hypothetical: YES
MQVLALKYRPKHFSELVGQESVAKTLSLALDNQRLANAYLFSGLRGSGKTSSSRIFARALMCKTGPKAVPCDTCIQCQSALNNHHIDIIEMDGASNRGIDDVRNLIEQTRYKPSFGRYKIFIIDEVHMFTTEAFNALLKTLEEPPSHVKFLLATTDALKLPATILSRTQHFRFKKIPENSVISHLKTILEKEQVSYESSALEKLAHSGQGSLRDTITLLEQAINYCDNAITESKVAEMLGAIDRSVLEDFFQSLINQDEARLQERYAILENYETEGVLEEMMLFLKAKLLSPDSYSILLIERFFKIIMSSLSLLKEGANASFVLLLLKMKFKEALKLKALDDAIVELEQTPFNQSPSISYNAPKQEPKSTERIEGREKLEKRERIETPQTPMLSAKDRIFHNLFKQVQTLVYERNYELGAVFEKNIRFIDFDSQTKTLTWESLATDKDKELLRERFKIVKSIVDGVFGKGENIKIALKHHLENKSAPEETKEVKEFKFPPLKPKLTTETTAEMQEKETKEAVGKALQTKENDTKEVQENETKETKEAQPKEAPTALQEFMANHSNLIEEIKSEFEIKSVELL

SEQ ID NO: 7289 - protein, 586 aa, Helicobacter pylori
  misc_feature (B) LOCATION 1...586
  hypothetical: YES
GLGSMQVLALKYRPKHFSELVGQESVAKTLSLALDNQRLANAYLFSGLRGSGKTSSSRIFARALMCKTGPKAVPCDTCIQCQSALNNHHIDIIEMDGASNRGIDDVRNLIEQTRYKPSFGRYKIFIIDEVHMFTTEAFNALLKTLEEPPSHVKFLLATTDALKLPATILSRTQHFRFKKIPENSVISHLKTILEKEQVSYESSALEKLAHSGQGSLRDTITLLEQAINYCDNAITESKVAEMLGAIDRSVLEDFFQSLINQDEARLQERYAILENYETEGVLEEMMLFLKAKLLSPDSYSILLIERFFKIIMSSLSLLKEGANASFVLLLLKMKFKEALKLKALDDAIVELEQTPFNQSPSISYNAPKQEPKSTERIEGREKLEKRERIETPQTPMLSAKDRIFHNLFKQVQTLVYERNYELGAVFEKNIRFIDFDSQTKTLTWESLATDKDKELLRERFKIVKSIVDGVFGKGENIKIALKHHLENKSAPEETKEVKEFKFPPLKPKLTTETTAEMQEKETKEAVGKALQTKENDTKEVQENETKETKEAQPKEAPTALQEFMANHSNLIEEIKSEFEIKSVELL

SEQ ID NO: 7290 - protein, 381 aa, Helicobacter pylori
  misc_feature (B) LOCATION 1...381
  hypothetical: YES
MKIAIVEDDINMRKSLELFFELQDDLEIVSFKNPKDALAKLDESFDLVITDINMPHMDGLEFLRLLEGKYESIVITGNATLNKAIDSIRLGVKDFFQKPFKPELLLESIYRTKKVLEFQKKHPLEKPLKKAPKHSFLATSKALEETKRQALKVASTDANVMLLGESGVGKEVFAHFIHQHSQRSKHPFIAINMSAIPEHLLESELFGYQKGAFTDATAPKMGLFESANKGTIFLDEIAEMPLQLQSKLLRVVQEKEITRLGDNKSVKIDVRFISATNANMKEKIASKEFREDLFFRLQIVPITIAPLRERVEEILPIAEIKLKEVCEAYHLGPKSFSKNAAKRLLEYSWHGNVRELLGVVERAAILSEETEIQEKDLFLER

SEQ ID NO: 7291 - protein, 385 aa, Helicobacter pylori
  misc_feature (B) LOCATION 1...385
  hypothetical: YES
KGRRMKIAIVEDDINMRKSLELFFELQDDLEIVSFKNPKDALAKLDESFDLVITDINMPHMDGLEFLRLLEGKYESIVITGNATLNKAIDSIRLGVKDFFQKPFKPELLLESIYRTKKVLEFQKKHPLEKPLKKAPKHSFLATSKALEETKRQALKVASTDANVMLLGESGVGKEVFAHFIHQHSQRSKHPFIAINMSAIPEHLLESELFGYQKGAFTDATAPKMGLFESANKGTIFLDEIAEMPLQLQSKLLRVVQEKEITRLGDNKSVKIDVRFISATNANMKEKIASKEFREDLFFRLQIVPITIAPLRERVEEILPIAEIKLKEVCEAYHLGPKSFSKNAAKRLLEYSWHGNVRELLGVVERAAILSEETEIQEKDLFLER

SEQ ID NO: 7292 - protein, 46 aa, Helicobacter pylori
  misc_feature (B) LOCATION 1...46
  hypothetical: YES
ILGRHMQDHLVNETKNIVEVGIDSSIEESYLAYSMSVIIGRRFTGR

SEQ ID NO: 7293 - protein, 58 aa, Helicobacter pylori
  misc_feature (B) LOCATION 1...58
  hypothetical: YES
TGRGRVKVRAKVHVEKTKNKEIIVLGEMPFQTNKAKLVEQISDLAREKQIEGISEVRD

SEQ ID NO: 7294 - protein, 63 aa, Helicobacter pylori
  misc_feature (B) LOCATION 1...63
  hypothetical: YES
SVGATWDRVGMATSIPPHRIDEIIDALAHVLGNPNAELDKILEFVKGPDFPTGGIIYGKGGYC

SEQ ID NO: 7295 - protein, 147 aa, Helicobacter pylori
  misc_feature (B) LOCATION 1...147
  hypothetical: YES
RRLKAVHRRILYAMHELGLTSKVAYKKSARIVGDVIGKYHPHGDTAVYDALVRMAQDFSMRLELVDGQGNFGSIDGDNAAAMRYTEARMTKASEEILRDIDKDTIDFVPNYDDTLKEPDILPSRLTNLLVSGGYMGSRRDGDFYPPS

SEQ ID NO: 7296 - protein, 175 aa, Helicobacter pylori
  misc_feature (B) LOCATION 1...175
  hypothetical: YES
MQDHLVNETKNIVEVGIDSSIEESYLAYSMSVIIGRALPDARDGLKPVHRRILYAMHELGLTSKVAYKKSARIVGDVIGKYHPHGDTAVYDALVRMAQDFSMRLELVDGQGNFGSIDGDNAAAMRYTEARMTKASEEILRDIDKDTIDFVPNYDDTLKEPDILPSRLPNLLVNGG

SEQ ID NO: 7297 - protein, 237 aa, Helicobacter pylori
  misc_feature (B) LOCATION 1...237
  hypothetical: YES
MQDHLVNETKNIVEVGIDSSIEESYLAYSMSVIIGRALPDARDGLKPVHRRILYAMHELGLTSKVAYKKSARIVGDVIGKYHPHGDTAVYDALVRMAQDFSMRLELVDGQGNFGSIDGDNAAAMRYTEARMTKASEEILRDIDKDTIDFVPNYDDTLKEPDILPSRLPNLLVNGANGIAVGMATSIPPHRIDEIIDALAHVLGNPNAELDKILEFVKGPDFPTGGIIYGKAGIVEAY

SEQ ID NO: 7298 - protein, 306 aa, Helicobacter pylori
  misc_feature (B) LOCATION 1...306
  hypothetical: YES
KTELLEVKEQFSSPRRTEIQESYESIDTEDLIANEPMVVSMSYKGYVKRVDLKAYERQNRGGKGKLSGSTYEDDFIENFFVANTHDILLFITNKGQLYHLKVYKIPEASRIAMGKAIVNLISLAPNEKIMATLSTKDFSDERSLAFFTKNGVVKRTNLSEFGGNRSYSGIRAIVLDEGDELVGAKVVDKNAKHLLIASYLGMFIKFPLEDVREIGRTTRGVMGIRLNENDFVVGAVVISDDSNKLLSVSENGLGKQTLAEAYREQSRGGKGVIGMKLTQKTGNLVSVISVDDENLNLMNPYRRPPK

SEQ ID NO: 7299 - protein, 305 aa, Helicobacter pylori
  misc_feature (B) LOCATION 1...305
  hypothetical: YES
TELLEVKEQFSSPRRTEIQESYESIDTEDLIANEPMVVSMSYKGYVKRVDLKAYERQNRGGKGKLSGSTYEDDFIENFFVANTHDILLFITNKGQLYHLKVYKIPEASRIAMGKAIVNLISLAPNEKIMATLSTKDFSDERSLAFFTKNGVVKRTNLSEFGGNRSYSGIRAIVLDEGDELVGAKVVDKNAKHLLIASYLGMFIKFPLEDVREIGRTTRGVMGIRLNENDFVVGAVVISDDSNKLLSVSENGLGKQTLAEAYREQSRGGKGVIGMKLTQKTGNLVSVISVDDENLNLMNPYRRPPK

SEQ ID NO: 7300 - protein, 585 aa, Helicobacter pylori
  misc_feature (B) LOCATION 1...585
  hypothetical: YES
VKVRAKVHVEKTKNKEIIVLGEMPFQTNKAKLVEQISDLAREKQIEGISEVRDESDREGIRVVIELKRDAMSEIVLNHLYKLTTMETTFSIILLAIYNKEPKIFTLLELLRLFLNHRKTIIIRRTIFELEKAKARAHILEGYLIALDNIDEIVRLIKTSPSPEAAKNALIERFSLSEIQSKAILEMRLQRLTGLERDKIKEEYQNLLELIDDLNGILKSEDRLNEVVKTELLEVKEQFSSPRRTEIQESYESIDTEDLIANEPMVVSMSYKGYVKRVDLKAYERQNRGGKGKLSGSTYEDDFIENFFVANTHDILLFITNKGQLYHLKVYKIPEASRIAMGKAIVNLISLAPNEKIMATLSTKDFSDERSLAFFTKNGVVKRTNLSEFGGNRSYSGIRAIVLDEGDELVGAKVVDKNAKHLLIASYLGMFIKFPLEDVREIGRTTRGVMGIRLNENDFVVGAVVISDDSNKLLSVSENGLGKQTLAEAYREQSRGGKGVIGMKLTQKTGNLVSVISVDDENLNLMILTASAKMIRVSIKDIRETGRNASGVKLINTADKVVYVNSCPKEEEPENLETSSVQNLFE

SEQ ID NO: 7301 - protein, 585 aa, Helicobacter pylori; identical to SEQ ID NO: 7300
  misc_feature (B) LOCATION 1...585
  hypothetical: YES

SEQ ID NO: 7302 - protein, 828 aa, Helicobacter pylori
  misc_feature (B) LOCATION 1...828
  hypothetical: YES
MQDHLVNETKNIVEVGIDSSIEESYLAYSMSVIIGRALPDARDGLKPVHRRILYAMHELGLTSKVAYKKSARIVGDVIGKYHPHGDTAVYDALVRMAQDFSMRLELVDGQGNFGSIDGDNAAAMRYTEARMTKASEEILRDIDKDTIDFVPNYDDTLKEPDILPSRLPNLLVNGANGIAVGMATSIPPHRIDEIIDALAHVLGNPNAELDKILEFVKGPDFPTGGIIYGKAGIVEAYKTGRGRVKVRAKVHVEKTKNKEIIVLGEMPFQTNKAKLVEQISDLAREKQIEGISEVRDESDREGIRVVIELKRDAMSEIVLNHLYKLTTMETTFSIILLAIYNKEPKIFTLLELLRLFLNHRKTIIIRRTIFELEKAKARAHILEGYLIALDNIDEIVRLIKTSPSPEAAKNALIERFSLSEIQSKAILEMRLQRLTGLERDKIKEEYQNLLELIDDLNGILKSEDRLNEVVKTELLEVKEQFSSPRRTEIQESYESIDTEDLIANEPMVVSMSYKGYVKRVDLKAYERQNRGGKGKLSGSTYEDDFIENFFVANTHDILLFITNKGQLYHLKVYKIPEASRIAMGKAIVNLISLAPNEKIMATLSTKDFSDERSLAFFTKNGVVKRTNLSEFGGNRSYSGIRAIVLDEGDELVGAKVVDKNAKHLLIASYLGMFIKFPLEDVREIGRTTRGVMGIRLNENDFVVGAVVISDDSNKLLSVSENGLGKQTLAEAYREQSRGGKGVIGMKLTQKTGNLVSVISVDDENLNLMILTASAKMIRVSIKDIRETGRNASGVKLINTADKVVYVNSCPKEEEPENLETSSVQNLFE

SEQ ID NO: 7303 - protein, 238 aa, Helicobacter pylori
  misc_feature (B) LOCATION 1...238
  hypothetical: YES
LLLIHFLILRKLLQHKTIMDKIIIQGARENNLKNIFLEIPKNQFVVFTGLSGSGKSTLAFDTLYAEGQRRYLESLSSYARQFLDKVGKPNVDKIEGLTPAIAIDQKTTSKNPRSTVGTITEIYDYLRLLLARVGEQFCPTCLEPISSMSASDIISQICHLEENSKIIILAPIIKDKKGSFNDKLESLRLKGYVRAFVDGVMVRLDEEIHLHKTKKHTIEAVVDRVVINSENASRIASA

SEQ ID NO: 7304 - protein, 676 aa, Helicobacter pylori
  misc_feature (B) LOCATION 1...676
  hypothetical: YES
AFEELEPLSFSFNSPKGACESCLGLGTKFSLDISKILDPNTPLNQGAIKVIFGYNRSYYAQMFEGFCTYNGIDSALCFNELNKEQQDALLYGNGTEISFHFKNSPLKRPWKGIIQIAYDMFKEQKDLSDYMSEKTCSSCNGHRLKASSLSVQVAGLKMADFLTKPIEEVYHFFNDPTHFNYLNEQEKKIAEPILKEILERVFFLYDVGLGYLTLGRDARTISGGESQRIRIASQIGSGLTGVLYVLDEPSIGLHEKDTLKLINTLRNLQKKGNTLIVVEHDKETIKHADFVVDIGPKAGRHGGEVVFSGSVKDLLQNNHSTALYLNGTKKIERPKFEPPKEKHFLEIKNVNINNIKNLSVQIPLKQLVCITGVSGSGKSSLILQTLLPTAQTLLNHAKKNQSLNGVEIVGLEYLDKVIYLDQAPIGKTPRSNPATYTGVMDEIRILFAEQKEAKILGYSTSRFSFNVKGGRCEKCQGDGDIKIEMHFLPDVLVQCDSCKGAKYNPQTLEIKVKGKSIADVLNMSVEEAYEFFAKFPKIAVKLKTLIDVGLGYITLGQNATTLSGGEAQRIKLAKELSKKDTGKTLYILDEPTTGLHFEDVNHLLQVLHSLVALGNSMLVIEHNLDIIKNADYIIDMGPDGGDKGGKVIASGTPLEVAQNCEKTQSYTGKFLALELK

SEQ ID NO: 7305 - protein, 941 aa, Helicobacter pylori
  misc_feature (B) LOCATION 1...941
  hypothetical: YES
LQHKTIMDKIIIQGARENNLKNIFLEIPKNQFVVFTGLSGSGKSTLAFDTLYAEGQRRYLESLSSYARQFLDKVGKPNVDKIEGLTPAIAIDQKTTSKNPRSTVGTITEIYDYLRLLFARVGEQFCPTCLEPISSMSASDIISQICHLEENSKIIILAPIIKDKKGSFNDKLESLRLKGYVRAFVDGVMVRLDEEIHLHKTKKHTIEAVVDRVVINSENASRIASAVEKALKESYGELEVEILQDNAPSIRKHYSEHKACFKCKMSFEELEPLSFSFNSPKGACESCLGLGTKFSLDISKILDPNTPLNQGAIKVIFGYNRSYYAQMFEGFCTYNGIDSALCFNELNKEQQDALLYGNGTEISFHFKNSPLKRPWKGIIQIAYDMFKEQKDLSDYMSEKTCSSCNGHRLKASSLSVQVAGLKMADFLTKPIEEVYHFFNDPTHFNYLNEQEKKIAEPILKEILERVFFLYDVGLGYLTLGRDARTISGGESQRIRIASQIGSGLTGVLYVLDEPSIGLHEKDTLKLINTLRNLQKKGNTLIVVEHDKETIKHADFVVDIGPKAGRHGGEVVFSGSVKDLLQNNHSTALYLNGTKKIERPKFEPPKEKHFLEIKNVNINNIKNLSVQIPLKQLVCITGVSGSGKSSLILQTLLPTAQTLLNHAKKNQSLNGVEIVGLEYLDKVIYLDQAPIGKTPRSNPATYTGVMDEIRILFAEQKEAKILGYSTSRFSFNVKGGRCEKCQGDGDIKIEMHFLPDVLVQCDSCKGAKYNPQTLEIKVKGKSIADVLNMSVEEAYEFFAKFPKIAVKLKTLIDVGLGYITLGQNATTLSGGEAQRIKLAKELSKKDTGKTLYILDEPTTGLHFEDVNHLLQVLHSLVALGNSMLVIEHNLDIIKNADYIIDMGPDGGDKGGKVIASGTPLEVAQNCEKTQSYTGKFLALELK

SEQ ID NO: 7306 - protein, 82 aa, Helicobacter pylori
  misc_feature (B) LOCATION 1...82
  hypothetical: YES
AFNAIEQDEITQKIEAEELLEHIQKVLNQMSEREQILIQLYYFEELNLSEIKEILGITESRISQIIKEVIKKVRQSLGVNHG

SEQ ID NO: 7307 - protein, 87 aa, Helicobacter pylori
  misc_feature (B) LOCATION 1...87
  hypothetical: YES
VPIDEQFNAIEQDEITQKIEAEELLEHIQKVLNQMSEREQILIQLYYFEELNLSEIKEILGITESRISQIIKEVIKKVRQSLGVNHG

SEQ ID NO: 7308 - protein, 131 aa, Helicobacter pylori
  misc_feature (B) LOCATION 1...131
  hypothetical: YES
MPKEIQKTEASEKSIEKVLNAYDKQQHHHQDALAIQYLPAVRAMAFRLKERLPSSIDFNDLVSIGTEELIKLARRYESALNDSFWGYAKTRVNGAMLDYLRSLDVISRSSRKLIKSIDIEITNTLMSMERA

SEQ ID NO: 7309 - protein, 137 aa, Helicobacter pylori
  misc_feature (B) LOCATION 1...137
  hypothetical: YES
ITLEIMILMMENRMPKEIQKTEASEKSIEKVLNAYDKQQHHHQDALAIQYLPAVRAMAFRLKERLPSSIDFNDLVSIGTEELIKLARRYESALNDSFWGYAKTRVNGAMLDYLRSLDVISRSSRKLIKSLILNPPNP

SEQ ID NO: 7310 - protein, 255 aa, Helicobacter pylori
  misc_feature (B) LOCATION 1...255
  hypothetical: YES
MILMMENRMPKEIQKTEASEKSIEKVLNAYDKQQHHHQDALAIQYLPAVRAMAFRLKERLPSSIDFNDLVSIGTEELIKLARRYESALNDSFWGYAKTRVNGAMLDYLRSLDVISRSSRKLIKSIDIEITKYLNEHGKEPSDEHLAEALGENIEKIREAKTASDIYALVPIDEQFNAIEQDEITQKIEAEELLEHIQKVLNQMSEREQILIQLYYFEELNLSEIKEILGITESRISQIIKEVIKKVRQSLGVNHG

SEQ ID NO: 7311 - protein, 119 aa, Helicobacter pylori
  misc_feature (B) LOCATION 1...119
  hypothetical: YES
VVSVLYRSGTHLSPEEITHSIRQKDKNTSISSVYRILNFLEKENFICVLETSKSGRRYEIAAKEHHDHIICLHCGKIIEFADPEIEHRQNEVVKKYQAKLISHDMKMFVWCKECQESDD

SEQ ID NO: 7312 - protein, 131 aa, Helicobacter pylori
  misc_feature (B) LOCATION 1...131
  hypothetical: YES
KNGLKNSKQREEVVSVLYRSGTHLSPEEITHSIRQKDKNTSISSVYRILNFLEKENFICVLETSKSGRRYEIAAKEHHDHIICLHCGKIIEFADPEIEHRQNEVVKKYQAKLISHDMKMFVWCKECQESDD

SEQ ID NO: 7313 - protein, 130 aa, Helicobacter pylori
  misc_feature (B) LOCATION 1...130
  hypothetical: YES
NGLKNSKQREEVVSVLYRSGTHLSPEEITHSIRQKDKNTSISSVYRILNFLEKENFICVLETSKSGRRYEIAAKEHHDHIICLHCGKIIEFADPEIEHRQNEVVKKYQAKLISHDMKMFVWCKECQESDD

SEQ ID NO: 7314 - protein, 216 aa, Helicobacter pylori
  misc_feature (B) LOCATION 1...216
  hypothetical: YES
KFKGGKMNKIELLLQTLAPKGVEFRKLGDIGEFYGGLVGKSKKSFSQGNKFYVPYINVFNNPQLDLNALESVQIGDKEKQNTIQLGDVLFTGSSENLEDCAMSCVVTQKIEEDIYLNSFCFGFRFFDKNLFNPSFLKHFLRDYNFRKNISKVANGVTRFNVSKQLLLKITIPIPPLEIQQEIVTILDAFTELNTELNTELNTELNARKKQYQYYQN

SEQ ID NO: 7315 - protein, 454 aa, Helicobacter pylori
  misc_feature (B) LOCATION 1...454
  hypothetical: YES
MNKIELLLHTLAPKGVEFRKLGDIGEFYGGLVGKSKKSFSQGNKFYVPYINVFNNPQLDLNALESVQIGDKEKQNTIQLGDVLFTGSSENLEDCAMSCVVTQKIEEDIYLNSFCFGFRFFDKNLFNPSFLKHFLRDYNFRKNISKVANGVTRFNVSKQLLLKITIPIPPLEIQQEIVTILDAFTELNTELNTELNTELNARKKQYQYYQNMLLDFNDINQSRKDAKERLAQKPYPKRLKQLLHTLAPKGVEFRKLGDIGEFTRGNGLLKSDLQDKGRPVVHYGQIHTQYNLSIDKTISYVNDALFHKLKKAKPNDILIATTSENVKDVGKSIAWLGNEEVAFSGEMYSYSTNENPKFIIYYFQTYFFQKEKEKKITGTKVMRIHENDLKQITIPIPPLEIQQEIVTILDQFSALTTDLQAGIPAEIKARKKQYEYYREKLLTFKPLTLNKEVKK

SEQ ID NO: 7316 - protein, 314 aa, Helicobacter pylori
  misc_feature (B) LOCATION 1...314
  hypothetical: YES
MAKVEVELKKLYQILVDAEYFYQVPNYQRPYVWDKDHLGALIDDLVVSYTNNREDEYFCGSIVIAENPKDKRWDVVDGQQRLTSFIILACTILRLYKHRLGQKSKAFIEESIYDRHDKEKERLKFLTAQNYNSIFENTVLKNLEFEDNIKKSEWNKKFDENTYLRNAYYFRELLNESMENGSISDMDDFVKWFYEHIALTRIICFEQDSAMQIFQVLNDRGQPLSPIDILKSSLMQEIKQDSEKRKDFITTWDKLVEACKSVEGIDIDLEDFFNMYLEYADPSSSKKRADKGLKRCSKTAKKTLASLFMALASS

SEQ ID NO: 7317 - protein, 293 aa, Helicobacter pylori
  misc_feature (B) LOCATION 1...293
  hypothetical: YES
MAKVEVELKKLYQILVDAEYFTKFPITNALMCGIRIIGLLMIWWSAIPTTEKMSIFAALLSLKIQKIKDGMLWMANRGRVLLSWLARFGFINTGGKNLRLLLKRAFMTDTIKKKSVNFPLKITTAFLKTRCRISLKTTLKRASGIRSLMKTLICVTLIILESYMRAWKMVPAIWMILSSGFMNTLLLGSFVLSKTARCKSFKCTTEASPALLIFNPVCKKSSKIVKSVRILPLGTNWLKLARALKAILIWKTFLTCINTLILVLLKREPIRDKGVQRQQKRRLRVYLWHRVHD

SEQ ID NO: 7318 - protein, 364 aa, Helicobacter pylori
  misc_feature (B) LOCATION 1...364
  hypothetical: YES
IQYKEKTMAKVEVELKKLYQILVDAEYFYQVPNYQRPYVWDKDHLGALIDDLVVSYTNNREDEYFCGSIVIAENPKDKRWDVVDGQQRLTSFIILACTILRLYKHRLGQKSKAFIEESIYDRHDKEKERLKFLTAQNYNSIFENTVLKNLEFEDNIKKSEWNKKFDENTYLRNAYYFRELLNESMENGSISDMDDFVKWFYEHIALTRIICFEQDSAMQIFQVLNDRGQPLSPIDILKSSLMQEIKQDSEKRKDFITTWDKLVEACKSVEGIDIDLEDFFNMYLEYADPSSSKKRADKGLKKVFKDSKKDACEFIYGISEFMKSYTDLLKKPDRYIYLLRYLPSRFWASILTTALYVKYPDFEL

SEQ ID NO: 7319 - protein, 62 aa, Helicobacter pylori
  misc_feature (B) LOCATION 1...62
  hypothetical: YES
VFKDSKKDACEFIYGISEFMKSYTDLLKKPDRYIYLLRYLPSRFWASILTTALYVKYPDFEL

SEQ ID NO: 7320 - protein, 89 aa, Helicobacter pylori
  misc_feature (B) LOCATION 1...89
  hypothetical: YES
ILGEIDTRNAALFLRLGNTGHKGMLSTIHANSAQNTLEALSLNLSMRYTHSLDKDLMRAYFKSAIDVIVHVNKINNERQIAEVLWTKEL

SEQ ID NO: 7321 - protein, 88 aa, Helicobacter pylori
  misc_feature (B) LOCATION 1...88
  hypothetical: YES
LGEIDTRNAALFLRLGNTGHKGMLSTIHANSAQNTLEALSLNLSMRYTHSLDKDLMRAYFKSAIDVIVHVNKINNERQIAEVLWTKEL

SEQ ID NO: 7322 - protein, 144 aa, Helicobacter pylori
  misc_feature (B) LOCATION 1...144
  hypothetical: YES
KSDDKRIGLLETLQTHRVLQALIGHFTPFLRSGITELIINTEQELWLYKINNTREKRGHVLFDKAFLLRFCEQLASFRGLFFDEEHPTLNCSIPFTRYRVSANHFSITTNNQITLNIRVPRLKPLSLEDFTFKVSNPESLKNLP

SEQ ID NO: 7323 - protein, 304 aa, Helicobacter pylori
  misc_feature (B) LOCATION 1...304
  hypothetical: YES
LETLQTHRVLQALIGHFTPFLESGITELIINTEQELWLYKINNTREKRGHVLFDKAFLLRFCEQLASFRGLFFDEEHPTLNCSIPFTRYRVSANHFSITTNNQITLNIRVPRLKPLSLEDFTFKVSNPESLKNLALKGHNILISGETSSGKTSLLNALLDCVNKDERVVSVEDSQELDLKAFSNCVGLLVGKQENTRFNYEDALNMAMRLNPDRLIVGEIDTRNAALFLRLGNTGHKGMLSTIHANSAQNTLEALSLNLSMRYTHSLDKDLMRAYFKSAIDVIVHVNKINNERQIAEVLWTKEL

SEQ ID NO: 7324 - protein, 357 aa, Helicobacter pylori
  misc_feature (B) LOCATION 1...357
  hypothetical: YES
MSDCKMSRVSRELFDNIKSFLHYKFKTMIRIQSVNDLELILKWQDRVLECQSFIALKELNHKLYNQGVRHTIMMQGLFLFFEYFDNRIKLKSLRNLAEEQVIDFLFGLVKNRKPSSMAKYVMVLRQFFDYLDRKRNYSFDFELKNLSFAKKEMYLPKHLNKNDFKAFIQALLKYHPKTSFEKRNQCILLLIALGGLRKFEALDLELKNIALENNHYRLLIKGKNNKERYAYIEKEFLQVPLNAWLSDTKRLKSFKGRFVFKKAKNNTTQKTCSLKGFIAKIFKLSNIDVKSYGLGLHLFRHSFATFIYDETQDLVLTSRALGHSSLLSTKIYIHTTQEHNKKVTLVLKGWLKNEKSE

SEQ ID NO: 7325 - protein, 360 aa, Helicobacter pylori
  misc_feature (B) LOCATION 1...360
  hypothetical: YES
GRKMSDCKMSRVSRELFDNIKSFLHYKFKTMIRIQSVNDLELILKWQDRVLECQSFIALKELNHKLYNQGVRHTIMMQGLFLFFEYFDNRIKLKSLRNLAEEQVIDFLFGLVKNRKPSSMAKYVMVLRQFFDYLDRKRNYSFDFELKNLSFAKKEMYLPKHLNKNDFKAFIQALLKYHPKTSFEKRNQCILLLIALGGLRKFEALDLELKNIALENNHYRLLIKGKNNKERYAYIEKEFLQVPLNAWLSDTKRLKSFKGRFVFKKAKNNTTQKTCSLKGFIAKIFKLSNIDVKSYGLGLHLFRHSFATFIYDETQDLVLTSRALGHSSLLSTKIYIHTTQEHNKKVTLVLKGWLKNEKSE

SEQ ID NO: 7326 - protein, 56 aa, Helicobacter pylori
  misc_feature (B) LOCATION 1...56
  hypothetical: YES
MSLGAVIRLIFCYKLEGVILDLKRINFKSYYPNNKNALFINNKKNPLSSTSKFILL

SEQ ID NO: 7327 - protein, 181 aa, Helicobacter pylori
  misc_feature (B) LOCATION 1...181
  hypothetical: YES
ENTMQDLQHFKNDITLILSKDRLDTYDSLEQYKENLKLISFITPKISNLEIYLRNALDYCLTQIKGSEWVFNENSLTDLINEQKEKKKEITHSLILSKMSLGAVVRLIFCYKLEGVILDLRAYRLRAYYHENKDTLLIKGKKRLLYNYIKAHIALNLLWTIRNRTYHWENLLKIQPNNRPQ

SEQ ID NO: 7328 - protein, 227 aa, Helicobacter pylori
  misc_feature (B) LOCATION 1...227
  hypothetical: YES
MQDLQHFKNDITLILSKDRLDTYDSLEQYKENLKLIAFITPKISNLEIYLRNALDYCLTQMKGSEWVFNESVLTPLIKELKEKKKEITHSLILSKMSLGAVIRLIFCYKLEGVILDLKRINFKSYYPNNKNALFINNKKNPLSSASKVHIALNLLWTIRNRAYHWENLLKIQPNKRPRITTYFIGLKDNDRARIPMNISVEPSKIVLFLDDLIKSIGNKDLEDLSSL

SEQ ID NO: 7329 - protein, 242 aa, Helicobacter pylori
  misc_feature (B) LOCATION 1...242
  hypothetical: YES
KLFLVIIFQKTLREIMQDLQHFKNDITLILSKDRLDTYDSLEQYKENLKLIAFITPKISNLEIYLRNALDYCLTQMKGSEWVFNESVLTPLIKELKEKKKEITHSLILSKMSLGAVIRLIFCYKLEGVILDLKRINFKSYYPNNKNALFINNKKNPLSSASKVHIALNLLWTIRNRAYHWENLLKIQPNKRPRITTYFIGLKDNDRARIPMNISVEPSKIVLFLDDLIKSIGNKDLEDLSSL

SEQ ID NO: 7330 - protein, 201 aa, Helicobacter pylori
  misc_feature (B) LOCATION 1...201
  hypothetical: YES
MRIKQTSINIIKNVKSNKGIETIQELILDNIESYNTFNQYHYNLWESSSVYPSKWLRPVLALANYFMTDEEKPHFIAMDAETQVEHILPQTPKRGSQWNADFDKEKREKWVNHIANLTLLKRKKNAKALNGDFDEKRKIYGGKDPSKVISCYDITKELYSDYRKWDEKSLQKRYDFLYEIITPILHIEGQEEKYEDDFDLE

SEQ ID NO: 7331 - protein, 221 aa, Helicobacter pylori
  misc_feature (B) LOCATION 1...221
  hypothetical: YES
ALKKLLVSYYYQTWIAGGTIMRIKQTSINIIKNVKSNKGIETIQELILDNIESYNTFNQYHYNLWESSSVYPSKWLRPVLALANYFMTDEEKPHFIAMDAETQVEHILPQTPKRGSQWNADFDKEKREKWVNHIANLTLLKRKKNAKALNGDFDEKRKIYGGKDPSKVISCYDITKELYSDYRKWDEKSLQKRYDFLYEIITPILHIEGQEEKYEDDFDLE

SEQ ID NO: 7332 - protein, 183 aa, Helicobacter pylori
  misc_feature (B) LOCATION 1...183
  hypothetical: YES
MIVGLIGVVEKISALEAHIEVQGVVYGVQVSMRTAALLQTGQKARLKILQVIKEDAHLLYGFLEESEKILFERLLKINGVGGRIALAILSSFSPNEFENIIATKEVKRLQQVPGIGKKLADKIMVDLIGFFIQDENRPARNEVFLALESLGFKSAEINPVLKTLKPHLSIEAAIKEALQQLRS

SEQ ID NO: 7333 - protein, 183 aa, Helicobacter pylori; identical to SEQ ID NO: 7332
  misc_feature (B) LOCATION 1...183
  hypothetical: YES

SEQ ID NO: 7334 - protein, 198 aa, Helicobacter pylori
  misc_feature (B) LOCATION 1...198
  hypothetical: YES
KRYKRLEQEIKKRDKMIVGLIGVVEKISALEAHIEVQGVVYGVQVSMRTAALLQTGQKARLKILQVIKEDAHLLYGFLEESEKILFERLLKINGVGGRIALAILSSFSPNEFENIIATKEVKRLQQVPGIGKKLADKIMVDLIGFFIQDENRPARNEVFLALESLGFKSAEINPVLKTLKPHLSIEAAIKEALQQLRS

SEQ ID NO: 7335 - protein, 71 aa, Helicobacter pylori
  misc_feature (B) LOCATION 1...71
  hypothetical: YES
VIKPHSVGLVRIGICLSLEVGYELQVRTRSGLALNHQVMVLNXPGTVDNDYRGEIKVILANLSDKDFKVQV

SEQ ID NO: 7336 - protein, 146 aa, Helicobacter pylori
  misc_feature (B) LOCATION 1...146
  hypothetical: YES
LMKIKIQKIHPNALIPKYQTEGSSGFDLHAVEEVVIKPHSVGLVRIGICLSLEVGYELQVRTRSGLALNHQVMVLNSPGTVDNDYRGEIKVILANLSDKDFKVQVGDRIAQGVVQKTYKAEFIECEQLDETSRGSGGFGSTGVSKA

SEQ ID NO: 7337 - protein, 154 aa, Helicobacter pylori
  misc_feature (B) LOCATION 1...154
  hypothetical: YES
TFTIKRFVLMKIKIQKIHPNALIPKYQTEGSSGFDLHAVEEVVIKPHSVGLVRIGICLSLEVGYELQVRTRSGLALNHQVMVLNSPGTVDNDYRGEIKVILANLSDKDFKVQVGDRIAQGVVQKTYKAEFIECEQLDETSRGSGGFGSTGVSKA

SEQ ID NO: 7338 - protein, 157 aa, Helicobacter pylori
  misc_feature (B) LOCATION 1...157
  hypothetical: YES
MRILGIDPGSRKCGYAIISHASNKLSLITAGFINITTTRLQEQILDLIEALDCLLDRYEVNEVAIEDIFFGYNPKSVIKLAQFRGALSLKILERIGNFSEYTPLQVKKALTGNGKAAKEQVAFMVKRLLNITSEIKPLDISDAIAVAITHAQRLKPR

SEQ ID NO: 7339 - protein, 158 aa, Helicobacter pylori
  misc_feature (B) LOCATION 1...158
  hypothetical: YES
LMRILGIDPGSRKCGYAIISHASNKLSLITAGFINITTTRLQEQILDLIEALDCLLDRYEVNEVAIEDIFFGYNPKSVIKLAQFRGALSLKILERIGNFSEYTPLQVKKALTGNGKAAKEQVAFMVKRLLNITSEIKPLDISDAIAVAITHAQRLKPR

SEQ ID NO: 7340 - protein, 120 aa, Helicobacter pylori
  misc_feature (B) LOCATION 1...120
  hypothetical: YES
MQKEIDSEIELFEIPTINENQIIKTLHDAKVSEGIISLYEQLTEIFEPSQLVLKLLSLQFETSKIGLNQQEIDAIQNPKEKTPKPPNKKTQHEPAHSFKKSHHRDRHPKTNRYSKKHKRR

SEQ ID NO: 7341 - protein, 130 aa, Helicobacter pylori
  misc_feature (B) LOCATION 1...130
  hypothetical: YES
SDHAPLDTQAPEKSIVFTRTKKRPMNCTNSLLLKITKVPPCMGIWIKGIAALLSWRLKKMTLTCWWLQIVASRGLDISGVSHVFSYHLPLNTESYIHRIGRTGRAGKKGHGDHFSNPFRIQRAFTHAKRN

SEQ ID NO: 7342 - protein, 221 aa, Helicobacter pylori
  misc_feature (B) LOCATION 1...221
  hypothetical: YES
MNCTNSLLLKITKVPPCMGIWIKGIAALLSWRLKKMTLTCWWLQIVASRGLDISGVSHVFSYHLPLNTESYIHRIGRTGRAGKKGMAITLVTPLEYKELLRMQKEIDSEIELFEIPTINENQIIKTLHDAKVSEGIISLYEQLTEIFEPSQLVLKLLSLQFETSKIGLNQQEIDAIQNPKEKTPKPPNKKTQHEPAHSFKKSHHRDRHPKTNRYSKKHKRR

SEQ ID NO: 7343 - protein, 63 aa, Helicobacter pylori
  misc_feature (B) LOCATION 1...63
  hypothetical: YES
KEHCFHAHQKEADELHQFLASKNYKSTALHGDMDQRDRRSSIMAFKKNDADVLVATDCCEPRA

SEQ ID NO: 7344 - protein, 120 aa, Helicobacter pylori
  misc_feature (B) LOCATION 1...120
  hypothetical: YES
MPEPIKRLADKILENPIKIHIAPSNITNTDITQRFYVINEHERAEAIMRLLDTQAPEKSIVFTRTKKEADELHQFLASKNYKSTALHGDMDQRDRRSSIMAFKKNDADVLVATDCCEPRA

SEQ ID NO: 7345 - protein, 201 aa, Helicobacter pylori
  misc_feature (B) LOCATION 1...201
  hypothetical: YES
VSPGQSVKKQCEFIKKNPQVMIATPGRLLDHLKNERIHKFVPKVVVLDESDEMLDMGFLDDIEEIFDYLPSEAQILLFSATMPEPIKRLADKILENPIKIHIAPSNITNTDITQRFYVINEHERAEAIMRLLDTQAPEKSIVFTRTKKEADELHQFLASKNYKSTALHGDMDQRDRRSSIMAFKKNDADVLVATDCCEPRA

SEQ ID NO: 7346 - protein, 95 aa, Helicobacter pylori
  misc_feature (B) LOCATION 1...95
  hypothetical: YES
LSDASKRSLNPTLMMNNNNTLPKPLEESLDLKEFIALFKTFFAKERGSIALENDLKQAFTYLNEVDAIGLPAPXKRERKRSYCCQTHQIRDAPFR

SEQ ID NO: 7347 - protein, 104 aa, Helicobacter pylori
  misc_feature (B) LOCATION 1...104
  hypothetical: YES
LVETNLKPPKNKFKPPKTIVPKPKEASLRLDLRGQRSEEALDLLDAFLNDALLGGFEEVLICHGKGSGILEKFVKEFLKNHPKVVSFSDAPINLGGSGVKIVKL

SEQ ID NO: 7348 - protein, 131 aa, Helicobacter pylori
  misc_feature (B) LOCATION 1...131
  hypothetical: YES
KRAGYTNFRQGLLPGRNRDWNALESAWELVETNLKPPKQYKPPLTIVPKPKEASLRLDLRGQRSEEALDLLDAFLNDALLGGFEEVLICHGKGSGILEKFVKEFLKNHPKVVSFSDAPINLGGSGVKIVKL

SEQ ID NO: 7349 - protein, 160 aa, Helicobacter pylori
  misc_feature (B) LOCATION 1...160
  hypothetical: YES
KAKAFYGEDKEKLNVLIENSSTLERELKQKNEHLENALKEQEDLKNAWLLEMEKQKEIFHHKKLELEKSYQQALNILKSEVASKDTSSMHKEIHKASEILNKHKTDQEIPQIITSFQINEKARYKNESVLVIQILDKGYYLVETEIGMRLKAHGSWLKQI

SEQ ID NO: 7350 - protein, 540 aa, Helicobacter pylori
  misc_feature (B) LOCATION 1...540
  hypothetical: YES
FSERDFELFRQKTNPYERCSCGFGFLSDASKRSLNPTLMMNNNNTLPKPLEESLDLKEFIALFKTFFAKERGSIALENDLKQAFTYLNEVDAIGLPAPKSVKESDLIVVKLTKLGTLHLDEIYEIVKRLRYIVVLQNAFKPFTHLKFHERLNAIILPPFFNDLILLLDDEGQIKQGANATLDALNESLNRLKKESTKIIHHYAHSKELAPYLVDTQSHLKHGYECLLLKSGFSSAIKGVVLERSANGYFYLLPESAQKIAQKIAQIGNEIDCCIVEMCQTLSRSLQKHLLFLKFLFKEFDFLDSLQARLNFAKAYNLEFVMPSFTQKKMILENFSHPILKEPKPLNLKFEKSMLAVTGVNAGGKTMLLKSLLSAAFLSKHLIPMKINAHHSTIPYFREIHAIINDPQNSANNISTFAGRMKQFSALLSKENMLLGVDEIELGTDADEASSLYKTLLEKLLKQNNQIVITTHHKRLSVLMAENKEVELLAALYDEEKERPTYTFLKGVIGKSYAFETALRYGVPPFLIEKRKPSMAKIRKN

SEQ ID NO: 7351 - protein, 663 aa, Helicobacter pylori
  misc_feature (B) LOCATION 1...663
  hypothetical: YES
LSDASKRSLNPTLMMNNNNTLPKPLEESLDLKEFIALFKTFFAKERGSIALENDLKQAFTYLNEVDAIGLPAPKSVKESDLIVVKLTKLGTLHLDEIYEIVKRLRYIVVLQNAFKPFTHLKFHERLNAIILPPFFNDLILLLDDEGQIKQGANATLDALNESLNRLKKESTKIIHHYAHSKELAPYLVDTQSHLKHGYECLLLKSGFSSAIKGVVLERSANGYFYLLPESAQKIAQKIAQIGNEIDCCIVEMCQTLSRSLQKHLLFLKFLFKEFDFLDSLQARLNFAKAYNLEFVMPSFTQKKMILENFSHPILKEPKPLNLKFEKSMLAVTGVNAGGKTMLLKSLLSAAFLSKHLIPMKINAHHSTIPYFREIHAIINDPQNSANNISTFAGRMKQFSALLSKENMLLGVDEIELGTDADEASSLYKTLLEKLLKQNNQIVITTHHKRLSVLMAENKEVELLAALYDEEKERPTYTFLKGVIGKSYAFETALRYGVPPFLIEKAKAFYGEDKEKLNVLIENSSTLERELKQKNEHLENALKEQEDLKNAWLLEMEKQKEIFHHKKLELEKSYQQALNILKSEVASKDTSSMHKEIHKASEILNKHKTDQEIPQIITSFQINEKARYKNESVLVIQILDEGYYLVETEIGMRLKAHGSWLKQI

SEQ ID NO: 7352 - protein, 762 aa, Helicobacter pylori
  misc_feature (B) LOCATION 1...762
  hypothetical: YES
LSDASKRSLNPTLMMNNNNTLPKPLEESLDLKEFIALFKTFFAKERGSIALENDLKQAFTYLNEVDAIGLPAPKSVKESDLIVVKLTKLGTLHLDEIYEIVKRLRYIVVLQNAFKPFTHLKFHERLNAIILPPFFNDLILLLDDEGQIKQGANATLDALNESLNRLKKESTKIIHHYAHSKELAPYLVDTQSHLKHGYECLLLKSGFSSAIKGVVLERSANGYFYLLPESAQKIAQKIAQIGNEIDCCIVEMCQTLSRSLQKHLLFLKFLFKEFDFLDSLQARLNFAKAYNLEFVMPSFTQKKMILENFSHPILKEPKPLNLKFEKSMLAVTGVNAGGKTMLLKSLLSAAFLSKHLIPMKINAHHSTIPYFREIHAIINDPQNSANNISTFAGRMKQFSALLSKENMLLGVDEIELGTDADEASSLYKTLLEKLLKQNNQIVITTHHKRLSVLMAENKEVELLAALYDEEKERPTYTFLKGVIGKSYAFETALRYGVPPFLIEKAKAFYGEDKEKLNVLIENSSTLERELKQKNEHLENALKEQEDLKNAWLLEMEKQKEIFHHKKLELEKSYQQALNILKSEVASKDTSSMHKEIHKASEILNKHKTDQEIPQIITSFQINEKARYKNESVLVIQILDKGYYLVETELGMRLKAHGSWLKQIQKPPKNKFKPPKTIVPKPKEASLRLDLRGQRSEEALDLLDAFLNDALLGGFEEVLICHGKGSGILEKFVKEFLKNHPKVVSFSDAPINLGGSGVKIVKL

SEQ ID NO: 7353 - protein, 70 aa, Helicobacter pylori
  misc_feature (B) LOCATION 1...70
  hypothetical: YES
IKHYKQYGTGLHLFRHSFATLIYQETQDLVLTSRALGHSSLLSTKIYIHTTQEHNKKVALVFDSLIENKK

SEQ ID NO: 7354 - protein, 120 aa, Helicobacter pylori
  misc_feature (B) LOCATION 1...120
  hypothetical: YES
LLEPSLNAWISDDYRLKYFNGAYLFKKDKQKSQNSLTLYNFIPLIFKLAQIKHYKQYGTGLHLFRHSFATLIYQETQNLVLTSRALGHSSLLSTKIYIHTTQEHNKKVALVFDSLIENKK

SEQ ID NO: 7355 - protein, 142 aa, Helicobacter pylori
  misc_feature (B) LOCATION 1...142
  hypothetical: YES
MLSEEQVINFLFELAQNRKPSSMAKYVMYLRQFFDYLDRKRRYGFDFTLKNLAFAKTKESLPRHLNDKDLKSFLKTLLDYKPATSFEKRNKCILLIVILGGLRKCEVLNIELKHIQVEEQNYSILIQGKGRKREKLILKRVC

SEQ ID NO: 7356 - protein, 254 aa, Helicobacter pylori
  misc_feature (B) LOCATION 1...254
  hypothetical: YES
MHEQGSISFIGEQGAKRLLYILYKLAFNAKSNKIALDRHYAKMFLQVVARTLIKNVNILEEQGFIEVIKGKQRYLYVYLKDYRELECLVKSKMAKYVMYLRQFFDYLDRKRRYGFDFTLKNLAFAKTKESLPRHLNDKDLKSFLKTLLDYKPATSFEKRNKCILLIVILGGLRKCEVLNIELKHIQVEEQNYSILIQGKGRKERKAYIKKSLLEPSLNAWISDDYRLKYFNGAYLFKKDKQKSQNSLTLYNLSP

SEQ ID NO: 7357 - protein, 278 aa, Helicobacter pylori
  misc_feature (B) LOCATION 1...278
  hypothetical: YES
GSNMPHNKLTKSQRELFCNLKAFLYTKAKNFTPIQDVKDMALILDTQDKILKCHNIEQLKQLCQILYNQGIKHTIMMQGLFLFFNYFKDNLKLRSFRMLSEEQVINFLFELAQNRKPSSMAKYVMYLRQFFDYLDRKRRYGFDFTLKNLAFAKTKESLPRHLNDKDLKSFLKTLLDYKPATSFEKRNKCILLIVILGGLRKCEVLNIELKHIQVEEQNYSILIQGKGRKERKAYIKKSLLEPSLNAWISDDYRLKYFNGAYLFKKDKQKSQNSLTLYN

SEQ ID NO: 7358 - protein, 355 aa, Helicobacter pylori
  misc_feature (B) LOCATION 1...355
  hypothetical: YES
MPHNKLTKSQRELFCNLKAFLYTKAKNFTPIQDVKDMALILDTQDKILKCHNIEQLKQLCQILYNQGIKHTIMMQGLFLFFNYFKDNLKLRSFRMLSEEQVINFLFELAQNRKPSSMAKYVMYLRQFFDYLDRKRRYGFDFTLKNLAFAKTKESLPRHLNDKDLKSFLKTLLDYKPATSFEKRNKCILLIVILGGLRKCEVLNIELKHIQVEEQNYSILIQGKGRKERKAYIKKSLLEPSLNAWISDDYRLKYFNGAYLFKKDKQKSQNSLTLYNFIPLIFKLAQIKHYKQYGTGLHLFRHSFATLIYQETQDLVLTSRALGHSSLLSTKIYIHTTQEHNKKVALVFDSLIENKK

SEQ ID NO: 7359 - protein, 355 aa, Helicobacter pylori; identical to SEQ ID NO: 7358
  misc_feature (B) LOCATION 1...355
  hypothetical: YES

SEQ ID NO: 7360 - protein, 392 aa, Helicobacter pylori
  misc_feature (B) LOCATION 1...392
  hypothetical: YES
FLSLSLIERDLKTMAKILKPNLDRDELNTLYKANLAYAKNTHEHYFKFKKDVDYKLFNPSIMHEQCSISFVGGQGAKRLLYILYKLAFNAKSNKIALDRHYAKMFLQVVARTLIKNVNILEEQGFIEVIKGKQRYLYVYLKDYRELECLVKSKMAKYVMYLRQFFDYLDRKRRYGFDFTLKNLAFAKTKESLPRHLNDKDLKSFLKTLLDYKPATSFEKRNKCILLIVILGGLRKCEVLNIELKHIQVEEQNYSILIQGKGRKERKAYIKKSLLEPSLNAWISDDYRLKYFNGAYLFKKDKQKSQNSLTLYNFIPLIFKLAQIKHYKQYGTGLHLFRHSFATLIYQETQDLVLTSRALGHSSLLSTKIYIHTTQEHNKKVALVFDSLIENKK

SEQ ID NO: 7361 - protein, 332 aa, Helicobacter pylori
  misc_feature (B) LOCATION 1...332
  hypothetical: YES
LNFEKMKLERLDLKEDEYERLLEQKKLLSSKEKLNDKIALALDVLENTHKITHALESVGHSAEFLKSALLEAGALLEKEQAKLEECERLDIEKVLEKLGMLSGIIKDYGSIAHAKERLGHVKNELHNLKEIDHHCETYHKEIERLKTECLKLCEEISGFRKEYLAGFNALLSAKAKDLLLKSPSLVLEEAPMSEKGAQKLVLHLQNSQLETLSSGEYSRLRLAFMLLEMEFLKDFKGVLVLDEMDSNLSGEESLAVSKALETLSSHSQIFAISHQVHIPAVAKNHILVFKENHKSLAKTLNNEERVLEIARMIGGSENIESAISFAKEKLKV

SEQ ID NO: 7362 - protein, 371 aa, Helicobacter pylori
  misc_feature (B) LOCATION 1...371
  hypothetical: YES
AFSPLLDALETKFTRLEKLERERRSLEDKKRFQKDLEERLNFEKMKLERLDLKEDEYERLLEQKKLLSSKEKLNDKIALALDVLENTHKITHALESVGHSAEFLKSALLEAGALLEKEQAKLEECERLDIEKVLEKLGMLSGIIKDYGSIAHAKERLGHVKNELHNLKEIDHHCETYHKEIERLKTECLKLCEEISGFRKEYLAGFNALLSAKAKDLLLKSPSLVLEEAPMSEKGAQKLVLHLQNSQLETLSSGEYSRLRLAFMLLEMEFLKDFKGVLVLDEMDSNLSGEESLAVSKALETLSSHSQIFAISHQVHIPAVAKNHILVFKENHKSLAKTLNNEERVLEIARMIGGSENIESAISFAKEKLKV

SEQ ID NO: 7363 - protein, 213 aa, Helicobacter pylori
  misc_feature (B) LOCATION 1...213
  hypothetical: YES
MQKKIFLLEDDYLLSESIKEFLEHLGYEVFCAFNGKEAHERLSVERFNLLLLDVQVPEMNSLELFKRIKNDFLISTPVIFITALQDNATLKNAFNLGASDYLKKPFDLDELEARIKRFFNDDPIEIMPNIFYHQHALNVKGKKEILAPKTAQLLEYFLEHKGQIISSQALENNLWEQAIDDSTLRTYIKVLRKLLGKNCIETHKGVGYRFNPL

SEQ ID NO: 7364 - protein, 218 aa, Helicobacter pylori
  misc_feature (B) LOCATION 1...218
  hypothetical: YES
RYNTPMQKKIFLLEDDYLLSESIKEFLEHLGYEVFCAFNGKEAHERLSVERFNLLLLDVQVPEMNSLELFKRIKNDFLISTPVIFITALQDNATLKNAFNLGASDYLKKPFDLDELEARIKRFFNDDPIEIMPNIFYHQHALNVKGKKEILAPKTAQLLEYFLEHKGQIISSQALENNLWEQAIDDSTLRTYIKVLRKLLGKNCIETHKGVGYRFNPL

SEQ ID NO: 7365 - protein, 131 aa, Helicobacter pylori
  misc_feature (B) LOCATION 1...131
  hypothetical: YES
GLTKNKLQETDDLLKTLNVKSLLEALLVYTPKGYKDLSLLERFETGLSGVLEVGILEKKNYAKVLKIFAYSKRFYKNLELVFFNHSAFYYNQFKTGESLFIYGKLEQSSLIKLISLTRLKSLPSLARFLNF

SEQ ID NO: 7366 - protein, 509 aa, Helicobacter pylori
  misc_feature (B) LOCATION 1...509
  hypothetical: YES
NPYRVWQDFLIFKKVKNHKKIQENLQKLLSLENLKKEGVKENVARLLLEIFFPTPHFVKDFETNKNFPSQHLNALKYIEMLFYMKNLERKKLQFNAKIACPNNSERLKAFIASLPFKLTRDQQNAIKEIQSDLTSPIACKRLIIGDVGCGKTMVILASMVLAYPNKTLLMAPTSILAKQLYHEALKFLPPYFEVELLLGGSHKKRSNHLFEKITHVVIGTQALLFDKRDLNEFALVITDEQHRFGTKQRYQLEKMASSKGNKPHSLQFSATPIPRTLALAKSAFVKTTMIREIPYPKEIETLVLHKREFKIVMEKISEEIAKNHQVIVVYPLVNKSEKIPYLSLSEGASFWQKRFKNIYTTSGQDKNKEEVIEEFRELGSILLATTLIEVGISLPRLSVIVILAPERLGLATLHQLRGRVSRNGLKGYCFLCTIQEENERLEKFADELDGFKIAELDLQYRKSGDLLQGGKQSGNSFEYIDLARDENIIAEVKQDFLKNASVSQGTFEN

SEQ ID NO: 7367 - protein, 628 aa, Helicobacter pylori
  misc_feature (B) LOCATION 1...628
  hypothetical: YES
LTKNKLQETDDLLKTLNVKSLLEALLVYTPKGYKDLSLLERFETGLSGVLEVGILEKKNYAKVLKIFAYSKRFYKNLELVFFNHSAFYYNQFKTGESLFIYGKLEQSSFNQAYIINTPKILTEFGKISLIFKKVKNHKKIQENLQKLLSLENLKKEGVKENVARLLLEIFFPTPHFVKDFETNKNFPSQHLNALKYIEMLFYMKNLERKKLQFNAKIACPNNSERLKAFIASLPFKLTRDQQNAIKEIQSDLTSPIACKRLIIGDVGCGKTMVILASMVLAYPNKTLLMAPTSILAKQLYHEALKFLPPYFEVELLLGGSHKKRSNHLFEKITHVVIGTQALLFDKRDLNEFALVITDEQHRFGTKQRYQLEKMASSKGNKPHSLQFSATPIPRTLALAKSAFVKTTMIREIPYPKEIETLVLHKREFKIVMEKISEEIAKNHQVIVVYPLVNKSEKIPYLSLSEGASFWQKRFKNIYTTSGQDKNKEEVIEEFRELGSILLATTLIEVGISLPRLSVIVILAPERLGLATLHQLRGRVSRNGLKGYCFLCTIQEENERLEKFADELDGFKIAELDLQYRKSGDLLQGGKQSGNSFEYIDLARDENIIAEVKQDFLKNASVSQGTFEN

SEQ ID NO: 7368 - protein, 250 aa, Helicobacter pylori
  misc_feature (B) LOCATION 1...250
  hypothetical: YES
MKLISWNVNGLRACMTKGFMDFFNSVDADVFCIQESKMQQEQNTFEFKGYFDFWNCAIKKGYSGVVTFTKKEPLSVSYGIDIKEHDKEGRVVTCEFESFYLVNVYTPNSQQALSRLSYRMSWEVXFKKFLKALELKKPVIVCGDLNVAHNEIDLENPKTNRKNAGFSDEEREKFSELLNAGFIDTFRYFYPNKEKAYTWWSYMQQARDKDIGWRIDYFLCSNPLKTRLKDALIYKDILGSDHCPVGLELV

SEQ ID NO: 7369 - protein, 250 aa, Helicobacter pylori
  misc_feature (B) LOCATION 1...250
  hypothetical: YES
MKLISWNVNGLRACMTKGFMDFFNSVDADVFCIQESKMQQEQNTFEFKGYFDFWNCAIKKGYSGVVTFTKKEPLSVSYGIDIKEHDKEGRVVTCEFESFYLVNVYTPNSQQALSRLSYRMSWEVEFKKFLKALELKKPVIVCGDLNVAHNEIDLENPKTNRKNAGFSDEEREKFSELLNAGFIDTFRYFYPNKEKAYTWWSYMQQARDKDIGWRIDYFLCSNPLKTRLKDALIYKDILGSDHCPVGLELV

SEQ ID NO: 7370 - protein, 259 aa, Helicobacter pylori
  misc_feature (B) LOCATION 1...259
  hypothetical: YES
FTQNQTRIKMKLISWNVNGLRACMTKGFMDFFNSVDADVFCIQESKMQQEQNTFEFKGYFDFWNCAIKKGYSGVVTFTKKEPLSVSYGIDIKEHDKEGRVVTCEFESFYLVNVYTPNSQQALSRLSYRMSWEVEFKKFLKALELKKPVIVCGDLNVAHNEIDLENPKTNRKNAGFSDEEREKFSELLNAGFIDTFRYFYPNKEKAYTWWSYMQQARDKDIGWRIDYFLCSNPLKTRLKDALIYKDILGSDHCPVGLELV

SEQ ID NO: 7371 - protein, 97 aa, Helicobacter pylori
  misc_feature (B) LOCATION 1...97
  hypothetical: YES
LHHIVPLCLARSIEEFDLLDKWENLIYIDAFNHAKISQTQNKHLCLYFENCDVILSKGLKEEQESLYFTYIGNVLYKLDLQNIMLKYNKDLLHSKNG

SEQ ID NO: 7372 - protein, 97 aa, Helicobacter pylori; identical to SEQ ID NO: 7371
  misc_feature (B) LOCATION 1...97
  hypothetical: YES

SEQ ID NO: 7373 - protein, 104 aa, Helicobacter pylori
  misc_feature (B) LOCATION 1...104
  hypothetical: YES
KKEKGFELHHIVPLCLARSIEEFDLLDKWENLIYIDAFNHAKISQTQNKHLCLYFENCDVILSKGLKEEQESLYFTYIGNVLYKLDLQNIMLKYNKDLLHSKNG

SEQ ID NO: 7374 - protein, 457 aa, Helicobacter pylori
  misc_feature (B) LOCATION 1...457
  hypothetical: YES
MDTNNNIEKEILALVKQNPKVSLIEYENYLSQLKYNPNASKSDIAFFYAPNKFLCTTITAKYGALLKEILSQNKVGMHLAHSVDVRIEVAPKIQVNAQSNINYKATKTSVKDSYTFENFVVGSCNNTVYEIAKKVAQSDTPPYNPVLFYGGTGLGKTHILNAIGNHALEKHKKVVLVTSEDFLTDFLKHLDNKNMDSFKKKYRHCDFFLLDDAQFLQGKPKLEEEFFHTFNELHANSKQIVLISDRSPKNIAGLEDRLKSRFEWGITAKVMPPDLETKLSIVKQKCQLNKITLPEEVMEYIAQHISDNIRQMEGAIIKISVNANLMNATIDLNLAKTVLEDLQKDHAEGSSLENILLAVAQSLNLKSSEIKVSSRQKNVALARKLVVYFARLYTPNPTLSLAQFLDLKDHSSISKMYSSVKKMLEEEKSPFILSLREEIKNRLNELNDKKTAFNSSE

SEQ ID NO: 7375 - protein, 487 aa, Helicobacter pylori
  misc_feature (B) LOCATION 1...487
  hypothetical: YES
KKHLNFKASFTFHSHAIPFSFTTYSRYNNAMDTNNNIEKEILALVKQNPKVSLIEYENYLSQLKYNPNASKSDIAFFYAPNKFLCTTITAKYGALLKEILSQNKVGMHLAHSVDVRIEVAPKIQVNAQSNINYKATKTSVKDSYTFENFVVGSCNNTVYEIAKKVAQSDTPPYNPVLFYGGTGLGKTHILNAIGNHALEKHKKVVLVTSEDFLTDFLKHLDNKNMDSFKKKYRHCDFFLLDDAQFLQGKPKLEEEFFHTFNELHANSKQIVLISDRSPKNIAGLEDRLKSRFEWGITAKVMPPDLETKLSIVKQKCQLNKITLPEEVMEYIAQHISDNIRQMEGAIIKISVNANLMNATIDLNLAKTVLEDLQKDHAEGSSLENILLAVAQSLNLKSSEIKVSSRQKNVALARKLVVYFARLYTPNPTLSLAQFLDLKDHSSISKMYSSVKKMLEEEKSPFILSLREEIKNRLNELNDKKTAFNSSE

SEQ ID NO: 7376 - protein, 426 aa, Helicobacter pylori
  misc_feature (B) LOCATION 1...426
  hypothetical: YES
RFGVNGVMERMDALITPSNWQKVRLGDILELLTDYHANGSYEILKNNVTLLKNVDFAIMIRTTNFENNDFKNDLIYIDKKAYEFLSKSKVFAGDILVNKIANAGTAYFMPKLNQPVSLGMNLFLLRIKPSYNNLFIFKQIANYERVLKTFANGSATKTITKNVIKNLLIPLPPLNEQIAIANILSDVDRYLCSLDALILKKESVKKALSFELLSQRKRLKGFNQNWQKVRLGDIGITISGLAGKTKQDFINGNAKYITFLNVLNNVIIDTSILENVKIYPNEKQNSFKKYDLFFNTSSETPKEVGMCAVLLDDIDQVFLNSFCFGFRIFDKAVDSLFLSYLINSEIGRKAFENLAQGSTRYNLSKSGFNNVCLILPPLNEQIAIANILSDVDSEIISLKNKKRQFENVKKALNHDLMSAKIRVLNK

SEQ ID NO: 7377 - protein, 624 aa, Helicobacter pylori
  misc_feature (B) LOCATION 1...624
  hypothetical: YES
VMERMDALITPSNWQKVRLGDILELLTDYHANGSYEILKNNVTLLKNVDFAIMIRTTNFENNDFKNDLIYIDKKAYEFLSKSKVFAGDILVNKIANAGTAYFMPKLNQPVSLGMNLFLLRIKPSYNNLFIFKQIANYERVLKTFANGSATKTITKNVIKNLLIPLPPLNEQIAIANILSDVDRYLCSLDALILKKESVKKALSFELLSQRKRLKGFNQNWQKVRLGDIGITISGLAGKTKQDFINGNAKYITFLNVLNNVIIDTSILENVKIYPNEKQNSFKKYDLFFNTSSETPKEVGMCAVLLDDIDQVFLNSFCFGFRIFDKAVDSLFLSYLINSEIGRKAFENLAQGSTRYNLSKSGFNNVCLILPPLNEQIAIANILSDVDSEIISLKNKKRQFENVKKALSFELLSQRKRLKGFNQNWQKVRLGDIGITISGLAGKTKQDFINGNAKYITFLNVLNNVIIDTSILENVKIYPNEKQNSFKKYDLFFNTSSETPKEVGMCAVLLDDIDQVFLNSFCFGFRIFDKAVDSLFLSYLINSEIGRKAFENLAQGSTRYNLSKSGFNNVCLILPPLNEQIAIANILSDVDSEIISLKNKKRQFENVKKALNHDLMSAKIRVLNK

SEQ ID NO: 7378 - protein, 624 aa, Helicobacter pylori
  misc_feature (B) LOCATION 1...624
  hypothetical: YES
VMERMDALITPSNWQKVRLGDILELLTDYHANGSYEILKNNVTLLKNVDFAIMIRTTNFENNDFKNDLIYIDKKAYEFLSKSKVFAGDILVNKIANAGTAYFMPKLNQPVSLGMNLFLLRIKPSYNNLFIFKQIANYERVLKTFANGSATKTITKNVIKNLLIPLPPLNEQIAIANILSDVDRYLCSLDALILKKESVKKALSFELLSQRKRLKGFNQNWQKVRLGDIGITISGLAGKTKQDFINGNAKYITFLNVLNNVIIDTSILENVKIYPNEKQNSFKKYDLFFNTSSETPKEVGMCAVLLDDIDQVFLNSFCFGFRIFDKAVDSLFLSYLINSEIGRKAFENLAQGSTRYNLSKSGFNNVCLILPPLNEQIAIANILSDVDRYLCSLDALILKKESVKKALSFELLSQRKRLKGFNQNWQKVRLGDIGITISGLAGKTKQDFINGNAKYITFLNVLNNVIIDTSILENVKIYPNEKQNSFKKYDLFFNTSSETPKEVGMCAVLLDDIDQVFLNSFCFGFRIFDKAVDSLFLSYLINSEIGRKAFENLAQGSTRYNLSKSGFNNVCLILPPLNEQIAIANILSDVDSEIISLRNKRRQFENVKKALNHDLMSAKIRVLNK

SEQ ID NO: 7379 - protein, 86 aa, Helicobacter pylori
  misc_feature (B) LOCATION 1...86
  hypothetical: YES
SILMCLKFISLSHCAPAKILSVEIKKIPIEELSAEEKESIQERFIVNNHLQKAKVRLLDIEKSKAIGKGGVNVCLASMPYRLSHRV

SEQ ID NO: 7380 - protein, 139 aa, Helicobacter pylori
  misc_feature (B) LOCATION 1...139
  hypothetical: YES
HLRILSMRHRINGESFKIGDSIKAVLTQVKRTKKGLLLELSRTTPKMLEALLELEVPEIKDKEIEIIHCARIPCNRAKVSFFSHNSRIDPICASVGVKGVRINAISNELNKENIDCIEYSNVPEIYITLALRSSQNFKR

SEQ ID NO: 7381 - protein, 150 aa, Helicobacter pylori
  misc_feature (B) LOCATION 1...150
  hypothetical: YES
GLRMKISDLIECIAYEKNLPKEMISKVIQGCLLKMAQNELDPLARYLVVEENKQLQLIQLVEVLEDDDERLVNDPSKYISLSKAKEMDPSVKIKDELSYSLSLESMKQGAINRLFKDLQYQLEKALEDSHFEAFQKRLNSVLMGQVILVG

SEQ ID NO: 7382 - protein, 149 aa, Helicobacter pylori
  misc_feature (B) LOCATION 1...149
  hypothetical: YES
GLRMKISDLIECIAYEKNLPKEMISKVIQGCLLKMAQNELDPLARYLVVEENKQLQLIQLVEVLEDDDERLVNDPSKYISLSKAKEMDPSVKIKDELSYSLSLESMKQGAINRLFKDLQYQLEKALEDSHFEAFQKRLNSVLMGQVILV

SEQ ID NO: 7383 - protein, 229 aa, Helicobacter pylori
  misc_feature (B) LOCATION 1...229
  hypothetical: YES
MRHRIKGESFKIGDSIKAVLTQVKRTKKGLLLELSRTTPKMLEALLELEVPEIKDKEIEIIHCARIPGNRAKVSFFSHNSRIDPIGAAVGVKGVRINAISNELNKENIDCIEYSNVPEIYITLALAPAKILSVEIKKIPIEELSAEEKESIQERFIVNNHLQKAKVRLLDIEKSKAIGKGGVNVCLASMLTGYHIEFETIPSVKENAENENEKETPKVGVEALESLFKN

SEQ ID NO: 7384 - protein, 395 aa, Helicobacter pylori
  misc_feature (B) LOCATION 1...395
  hypothetical: YES
MEKISDLIECIAYEKNLPKEMISKVIQGCLLKMAQNELDPLARYLVVEENKQLQLIQLVEVLEDDDERLVNDPSKYISLSKAKEMDPSVKIKDELSYSLSLESMKQGAINRLFKDLQYQLEKALEDSHFEAFQKRLNSVLMGQVILVDHNQNTFIEIEQQFQGVLSMRHRIKGESFKIGDSIKAVLTQVKRTKKGLLLELSRTTPKMLEALLELEVPEIKDKEIEIIHCARIPGNRAKVSFFSHNSRIDPIGAAVGVKGVRINAISNELNKENIDCIEYSNVPEIYITLALAPAKILSVEIKKIPIEELSAEEKESIQERFIVNNHLQKAKVRLLDIEKSKAIGKGGVNVCLASMLTGYHIEFETIPSVKENAENENEKETPKVGVEALESLFKN

SEQ ID NO: 7385 - protein, 140 aa, Helicobacter pylori
  misc_feature (B) LOCATION 1...140
  hypothetical: YES
MPFLKNWIWSLKMALSAISGASGVGKSVLIASLLGAFGLKESNASNIEVELIAPFLDTEEYGIFREDEHEPLVISVIKKEKTRYFLNQTSLSKNTLKALLKGLIKRLSNDRFSQNELNDILMLSLLDGYIQNKNKRLAPF

SEQ ID NO: 7386 - protein, 156 aa, Helicobacter pylori
  misc_feature (B) LOCATION 1...156
  hypothetical: YES
MRDFNNIQITRLKVRQNAVFEKLDLEFKDGLSAISGASGVGKSVLIASLLGAFGLKESNASNIEVELIAPFLDTEEYGIFREDEHEPLVISVIKKEKTRYFLNQTSLSKNTLKALLKGLIKRLSNDRFSQNELNDILMLSLLDGYIQNKNRRLAPF

SEQ ID NO: 7387 - protein, 163 aa, Helicobacter pylori
  misc_feature (B) LOCATION 1...163
  hypothetical: YES
KGKRVKNMRDFNNIQITRLKVRQNAVFEKLDLEFKDGLSAISGASGVGKSVLIASLLGAFGLKESNASNIEVELIAPFLDTEEYGIFREDEHEPLVISVIKKEKTRYFLNQTSLSKNTLKALLKGLIKRLSNDRFSQNELNDILMLSLLDGYIQNKNRRLAPF

SEQ ID NO: 7388 - protein, 228 aa, Helicobacter pylori
  misc_feature (B) LOCATION 1...228
  hypothetical: YES
MALDLRKKNQVTQDSLRKNLFVDMHRMGLIERYNKNKEPTNPYIQSNIKYISLTPLAIEFLNAQDLLRKNFCYTQALENLLQGFGAECREVMIELENHYLDIEEMMFFVTFLNIENFTRSEIIEYVREYRSLSRIQKEKLKELAQDYCNPNHFNGNKLDKRDYHNWKNQAQQIFSLLEQSVFFETNKERLILKTLNEENKQNDKKLKRSIKEKALYFEKHGVKKRKGF

SEQ ID NO: 7389 - protein, 231 aa, Helicobacter pylori
  misc_feature (B) LOCATION 1...231
  hypothetical: YES
GDIMALDLRKKNQVTQDSLRKNLFVDMHRMGLIERYNKNKEPTNPYIQSNIKYISLTPLAIEFLNAQDLLRKNFCYTQALENLLQGFGAECREVMIELENHYLDIEEMMFFVTFLNIENFTRSEIIEYVREYRSLSRIQKEKLKELAQDYCNPNHFNGNKLDKRDYHNWKNQAQQIFSLLEQSVFFETNKERLILKTLNEENKQNDKKLKRSIKEKALYFEKHGVKKRKGF

SEQ ID NO: 7390 - protein, 242 aa, Helicobacter pylori
  misc_feature (B) LOCATION 1...242
  hypothetical: YES
MALDLRKKNQVTQDSLRKNLFVDMHRMGLIERYNKNKEPTNPYIQSNIKYISLTPLAIEFLNAQDLLRKNFCYTQALENLLQGFGAECREVMIELENHYLDIEEMMFFVTFLNIENFTRSEIIEYVREYRSLSRIQKEKLKELAQDYCNPNHFNGNKLDKRDYHNWKNQAQQIFSLLEQSVFFETNKERLILKTLNEENKQNDKKLKRSIKEKALYFEKHGVKKKKRVLSCIILCLYVWLAL

SEQ ID NO: 7391 - protein, 287 aa, Helicobacter pylori
  misc_feature (B) LOCATION 1...287
  hypothetical: YES
MSDNLLHKDIQALIARLKHQDLNLSALEKSLSRLIHDEINLEYLKACGLNFVETSENLITLKNLKTPLKDEVFSFVDLETTGSCPLKHEILEIGAVQVKGGEIINRFETLVKVKSVPDYIAELTGITYEDTLNAPSAHEALQELRIFLGNSVFVAHNANFDYNFLGRYFVEKLHCPLLNLKLCTLDLSKRAILSMRYSLSFLKELLGFGIEVSHRAYADALASYKLFEICLLNLPSYIKTTMDLIDFSKCANTLIKRPPRAKYQEIPSPFPLFERTKGLLDIMKATS

SEQ ID NO: 7392 - protein, 323 aa, Helicobacter pylori
  misc_feature (B) LOCATION 1...323
  hypothetical: YES
MIKISLNSNKRAWMWWFQGVIFLNPKIVSWLLKAYRMSDNLLHKDIQALIARLKHQDLNLSALEKSLSRLIHDEINLEYLKACGLNFVETSENLITLKNLKTPLKDEVFSFVDLETTGSCPLKHEILEIGAVQVKGGEIINRFETLVKVKSVPDYIAELTGITYEDTLNAPSAHEALQELRIFLGNSVFVAHNANFDYNFLGRYFVEKLHCPLLNLKLCTLDLSKRAILSMRYSLSFLKELLGFGIEVSHRAYADALASYKLFEICLLNLPSYIKTTMDLIDFSKCANTLIKRPPRAKYQEIPSPFPLFERTKGLLDIMKATS

SEQ ID NO: 7393 - protein, 323 aa, Helicobacter pylori; identical to SEQ ID NO: 7392
  misc_feature (B) LOCATION 1...323
  hypothetical: YES

SEQ ID NO: 7394 - protein, 115 aa, Helicobacter pylori
  misc_feature (B) LOCATION 1...115
  hypothetical: YES
MTISKRSPISSKKIQEYKDLVAQYKDPNPLYPLNKQDLINKIQDLKNTFSLTLKAPKTKAELEKAIEKHIKKYNFFALDDKSLLDGLNYFIPNLFGTLKLSPKEEEEGFCFLWAY

SEQ ID NO: 7395 - protein, 491 aa, Helicobacter pylori
  misc_feature (B) LOCATION 1...491
  hypothetical: YES
APKKRKRAFASYGRIRALRKKLDDALSGGEYQNAFEWRFEFPEVLDDEGDFLGFDCIIGNPPYIRQEQIKDLKPLLEKQYQDFYNSTADIYTYFFALSFHLLREKGFSAFITSNKYARAKYGAKLREWLLKKTTLVSYMELNALKVFESAAVDTSIIHFIKQPPLKESDFKYYEPTPDDKDDLKSTPYLSMKQNALSTESFIFANATLLDLRDKIESVGTPLKDWDIQINYGIKTGANEAFIIPTEKRDEILNACKTQEERERTERLIKPILRGKDIKRYSYEWAGEWLINTHNGYTSNLKSKIPPIDIEKYPATKAHLDAHYDTIATRCDQGDTPYHLRNCAYLEDFEKEKIVYPETSQGAYFIYENSGIFLEKTVFMIVSDAYNLKLLTALLNSKLITFYFKNFCGGCILGKSGYQYNKHALEKIPIPQITEKNQELADKITDCAEQILALKAKDPKANTQKLEKEIDALVYQLYHLTDEEIKTIEDGQ

SEQ ID NO: 7396 - protein, 591 aa, Helicobacter pylori
  misc_feature (B) LOCATION 1...591
  hypothetical: YES
MTISKRSPISSKKIQEYKDLVAQYKDPNPLYPLNKADLINKIQDLKNTFSLTLKXPKTKAELEKAIEKHIKKYNFFALDDKSLLDGLNYFIPNLFGTLKLSPKEEEEAFASYGRIRALRKKLDDALSGGEYHNAFEWRFEFPEVLDDEGDFLGFDCIIGNPPYIRQEQIKDLKPLLEKQYQDFYNSTADIYTYFFALSFHLLREKGFSAFITSNKYARAKYGAKLREWLLKKTTLVSYMELNALKVFESAAVDTSIIHFIKQPPLKESDFKYYEPTPDDKDDLKSTPYLSMKQNALSTESFIFANATLLDLRDKIESVGTPLKDWDIQINYGIKTGANEAFIIPTEKRDEILNACKTQEERERTERLIKPILRGKDIKRYSYEWAGEWLINTHNGYTSNLKSKIPPIDIEKYPATKAHLDAHYDTIATRCDQGDTPYHLRNCAYLEDFEKEKIVYPETSQGAYFIYENSGIFLEKTVFMIVSDAYNLKLLTALLNSKLITFYFKNFCGGCILGKSGYQYNKHALEKIPIPQITEKNQELADKITDCAEQILALKAKDPKANTQKLEKEIDALVYQLYHLTDEEIKTIEDGQ

SEQ ID NO: 7397 - protein, 696 aa, Helicobacter pylori
  misc_feature (B) LOCATION 1...696
  hypothetical: YES
MMSFTRIPLKVFIKKYNPQEPKKETIENFEKEINSLLENVPRQDDEEFQKNEINKFLKNAYGYDCNTYEKVDSVIYVDKEVRVLIEVKALNNKTEFPKNRENPLSKAFCQMVLYFLEEIEKEKNNSLKHTIICNAHEFFLFDCKDLLSLKEDKRIKKFYKNYAKKEGTDSSKPKFYKDLEQFLQEDFQGELRYTHFNLSDDFKELPLIYQVLSQEVLLKQKRTLDANTLNKDFYEELLYILGLEEQNDKGKILIKPSRTKNSLSGALKEKYKNLDDEEVMALLIAWNNRILFLRLLESLLISFEHFEKERSFLTTGNFKDFNALNTLFFEVLAKKNSERLPEIKENKILGKIPYLNSSLFDKTPLELKGHEIKLLDNKKLEIYKNSVLKKHENYQKDKASLPLLEYLFEFLRVYDFTTTPKDIKDNXDTSESRLINPSVLGLVFEKLNGYKEGSFYTPSFITSYMCKESITTIVLDKFNQKYNIECDKLKELKNYLKNSYKEDKRKEYLQLLLTLRICDPAVGSGHFLVSALNEMVLIAYELGLIASLHRYSLTLENDEIIIHYTPTGEIFNYKKPLRENDPHHHIQKELFELKKSIIENCLFGVDINPNSCEITKLRLWIELLKYSYYIFEEGKNTNALETLPNIDINIKCANSLISRFNLNDDLKKIPNIKQKNPRIQRSSRPIQRPKPSLSLK

SEQ ID NO: 7398 - protein, 740 aa, Helicobacter pylori
  misc_feature (B) LOCATION 1...740
  hypothetical: YES
IVKIRANKINYSNVSHGTISKKSVLFKIHGTFVIIVFIPFQRRFMMSFTRIPLKVFIKKYNPQEPKKETIENFEKEINSLLENVPRQDDEEFQKNEINKFLKNAYGYDCNTYEKVDSVIYVDKEVRVLIEVKALNNKTEFPKNRENPLSKAFCQMVLYFLEEIEKEKNNSLKHTIICNAHEFFLFDCKDLLSLKEDKRIKKFYKNYAKKEGTDSSKPKFYKDLEQFLQEDFQGELRYTHFNLSDDFKELPLIYQVLSQEVLLKQKRTLDANTLNKDFYEELLYILGLEEQNDKGKILIKPSRTKNSLSGALKEKYKNLDDEEVMALLIAWNNRILFLRLLESLLISFEHFEKERSFLTTGNFKDFNALNTLFFEVLAKKNSERLPEIKENKILGKIPYLNSSLFDKTPLELKGHEIKLLDNKKLEIYKNSVLKKHENYQKDKASLPLLEYFFKFLRVYDFTTTPKDIKDNTDTSESRLINPSVLGLVFEKLNGYKEGSFYTPSFITSYMCKESITTIVLDKFNQKYNIECDKLKELKNYLKNSYKEDKRKEYLQLLLTLRICDPAVGSGHFLVSVLNEMVWVAYKLGLIASLYRYDLKLENDEIIIHYTPTGEIFNYTIPHSENDPHHHIQKELFELKKSIIENCLFGVDINPNSCEITKLRLWIELLKYSYYIFEEGKNTNALETLPNIDINIKCANSLISRFNLNDDLKKIPNIKQKNPRIQRSSRPIQRPKPSLSLK

SEQ ID NO: 7399 - protein, 1253 aa, Helicobacter pylori
  misc_feature (B) LOCATION 1...1253
  hypothetical: YES
MMSFTRIPLKVFIKKYNPQEPKKETIENFEKEINSLLENVPRQDDEEFQKNEINKFLKNAYGYDCNTYEKVDSVIYVDKEVRVLIEVKALNNKTEFPKNRENPLSKAFCQMVLYFLEEIEKEKNNSLKHTIICNAHEFFLFDCKDLLSLKEDKRIKKFYKNYAKKEGTDSSKPKFYKDLEQFLQEDFQGELRYTHFNLSDDFKELPLIYQVLSQEVLLKQKRTLDANTLNKDFYEELLYILGLEEQNDKGKILIKPSRTKNSLSGALKEKYKNLDDEEVMALLIAWNNRILFLRLLESLLISFEHFEKERSFLTTGNFKDFNALNTLFFEVLAKKNSERLPEIKENKILGKIPYLNSSLFDKTPLELKGHEIKLLDNKKLEIYKNSVLKKHENYQKDKASLPLLEYFFKFLHLYKFTTTPKDIKDNTDTSESRLINPSVLGLVFEKLNGYKEGSFYTPSFITSYMCKESITTIVLDKFNQKYNIECDKLKELKNYLKNSYKEDKRKEYLQLLLTLRICDPAVGSGHFLVSALNEMVLIAYELGLIASLHRYSLTLENDEIIIHYTPTGEIFNYKKPLRENDPHHHIQKELFELKKSIIENCLFGVDINPNSCEITKLRLWIELLKYSYYIFEEGKNTNALETLPNIDINIKCANSLISRFNLNDDLKKIPNIKKKIQEYKDLVAQYKDPNPLYPLNKADLINKIQDLKNTFSLTLKDPKTKAELEKTIEKHIKKYNFFALDDKSLLDGLNYFIPSLFGTLKLSPKEEEEAFASYGRIRALRKKLDDALSGGEYQNAFEWRFEFPEVLDDEGDFLGFDCIIGNPPYIRQEQIKDLKPLLEKQYQDFYNSTADIYTYFFALSFHLLREKGFSAFITSNKYARAKYGAKLREWLLKKTTLVSYMELNALKVFESAAVDTSIIHFIKQPPLKESDFKYYEPTPDDKDDLKSTPYLSMKQNALSTESFIFANATLLDLRDKIESVGTPLKDWDIQINYGIKTGANEAFIIPTEKRDEILNACKTQEERERTERLIKPILRGKDIKRYSYEWAGEWLINTHNGYTSNLKSKIPPIDIEKYPATKAHLDAHYDTIATRCDQGDTPYHLRNCAYLEDFEKEKIVYPETSQGAYFIYENSGIFLEKTVFMIVSDAYNLKLLTALLNSKLITFYFKNFCGGCILGKSGYQYNKHALEKIPIPQITEKNQELADKITDCAEQILALKAKDPKANTQKLEKEIDALVYQLYHLTDEEIKTIEDGQ

SEQ ID NO: 7400 - protein, 387 aa, Helicobacter pylori
  misc_feature (B) LOCATION 1...387
  hypothetical: YES
LDFVGKKIALNQAFKKNHKILKPLNESTSKHILIKGDNLDALKILKQSYSEKIKMIYIDPPYNTKNDNFIYGDDFSQSNEEVLKTLDYSKEKLDYIKNLFGSKCHSGWLSFMYPRLLLAKDLLKQDGVIFISIDDNECAQLKLLCDEIFGEGNFIETFLWNKTQTPPSASNKTRKTHEFILCYQKNKDNKKMIAKFSDGGDAPLWNETNSERILTFPANYVFSNLKNGIYKKGIRDKIEVLDDIEVYNGKIINSFRLKGHFRWKQETLNEEIINNVFLVVKSDKFSIRYCREGERIVMPTNEISKKDNVGTNETASKELFKLFDNNKIFNFNKPVSLIKYLISICSNNTNEGDIILDFFAGSGTTAHAVLESNKSDYQKLSEGGGVI

SEQ ID NO: 7401 - protein, 412 aa, Helicobacter pylori
  misc_feature (B) LOCATION 1...412
  hypothetical: YES
QAHADTGKLKALLGDFSEIKEEGYGLDFVGKKIALNQAFKKNHKILKPLNESTSKHILIKGDNLDALKILKQSYSEKIKMIYIDPPYNTKNDNFIYGDDFSQSNEEVLKTLDYSKEKLDYIKNLFGSKCHSGWLSFMYPRLLLAKDLLKQDGVIFISIDDNECAQLKLLCDEIFGEGNFIETFLWNKTQTPPSASNKTRKTHEFILCYQKNKDNKKMIAKFSDGGDAPLWNETNSERILTFPANYVFSNLKNGIYKKGIRDKIEVLDDIEVYNGKIINSFRLKGHFRWKQETLNEEIINNVFLVVKSDKFSIRYCREGERIVMPTNEISKKDNVGTNETASKELFKLFDNNKIFNFNKPVSLIKYLISICSNNTNEGDIILDFFAGSGTTAHAVLESNKSDYQKLSEGGGVI

SEQ ID NO: 7402 - protein, 446 aa, Helicobacter pylori
  misc_feature (B) LOCATION 1...446
  hypothetical: YES
MQNKEIGGEKSVNEKNVEVFNRYFPGCLSIENDNKLTLDTGKLKALLGDFSEIKEEGYGLDFVGKKIALNQAFKKNHKILKPLNESTSKHILIKGDNLDALKILKQSYSEKIKMIYIDPPYNTKNDNFIYGDDFSQSNEEVLKTLDYSKEKLDYIKNLFGSKCHSGWLSFMYPRLLLAKDLLKQDGVIFISIDDNECAQLKLLCDEIFGEGNFIETFLWNKTQTPPSASNKTRKTHEFILCYQKNKDNKKMIAKFSDGGDAPLWNETNSERILTFPANYVFSNLKNGIYKKGIRDKIEVLDDIEVYNGKIINSFRLKGHFRWKQETLNEEIINNVFLVVKSDKFSIRYCREGERIVMPTNEISKKDNVGTNETASKELFKLFDNNKIFNFNKPVSLIKYLISICSNNTNEGDIILDFFAGSGTTAHAVLESNKSDYQKLSEGGGVI

SEQ ID NO: 7403 - protein, 127 aa, Helicobacter pylori
  misc_feature (B) LOCATION 1...127
  hypothetical: YES
YKAVKSVLKGFMMKTEREVQNQVIETFKAMGYAYLGDLTKSDNENINKESLKAWLIKNQKIEPERWHKIEQEIHTALKNDLYEANQKFYELLIYGVKTKISLNENTQRIGSLIGKTFLRMNLAWLKK

SEQ ID NO: 7404 - protein, 155 aa, Helicobacter pylori
  misc_feature (B) LOCATION 1...155
  hypothetical: YES
KHSTHWLIDWKDVSKNEFSVAEEVSAKGPNMKRPDIVLYVNGIALGVLELKKSSVSVESGIRQNLDNQKKEFIRDFFKTIQLVMAGNESQGLKYGVIETEEKYYLSWKEEGVQKNLFETIECFLDKKRFLEFIHDFLIFDKGQKKVRQIPSVFCN

SEQ ID NO: 7405 - protein, 229 aa, Helicobacter pylori
  misc_feature (B) LOCATION 1...229
  hypothetical: YES
RETQQIKQEAGFYRHLPKVVGLSSGDSVDLKSYNEDMRRILDAYIKTTDSEVLFQIEDQGLCEVLAQMDINDFNKALSQVFKNESSMAESIANNTRKRIIEKEASDPKYYEKLSSLLNDLILQFREKKLTYLEYLQQIQDLAKKVIDKEDRNYPKKINTKALKTLYDNLDENEALALETDACIRGNKKDGWVGHNQKEKNLKIALRKIINDEVLLENIFNLAKHIEEYH

SEQ ID NO: 7406 - protein, 260 aa, Helicobacter pylori
  misc_feature (B) LOCATION 1...260
  hypothetical: YES
KQNLKDKVAVITSYEPNIADLKDCGSNESEESYKYRAYCKMLQNFFNEKDEKKALNKIKEFEEEVKKRFINEPARMKLLIVVDKLLTGFDAPSLTYLYIDKRMQDHGLFQAVCRVNRLDGEDKDFGCIIDYSDLFDSLQEAHSDYTNGAFENYEREDIQGLISDKSQKIKKKLEETRDQLKSLCESVKEPKDEEDYIAYFCGDNLEKNAQKRRLFYQLVGAFLRMFVELNNLEKPIYSKEKRNKSNKKRDFTGIYQRWLA

SEQ ID NO: 7407 - protein, 300 aa, Helicobacter pylori
  misc_feature (B) LOCATION 1...300
  hypothetical: YES
FLIRGKRKCARFHQYFAIKKTQEFIQRKEGGIIWHTQGSGKSLTMVWLTRWIRRNIKQARVLIVTDRRELDAQIQGVFQGIGEKIYRADSKKDLLSVLFENKKFLVGSLVHKFDDNDLEDLKKQPVLKEWIVLVDECHRTQSGKLHKAMKSLLPNAIFIAFSGTPLLKQDKKTSQEVFGDYIHCYKFNEAVSDKVVLDLNYEARSVEQYVSSPEKLDEYFELKTQNLNEAAKTELKKKWVNLQKVFSTKDRLEHIVQDIVLDMAKLPRLSNGKGNAMLVAESVYNACRYFELFLETEFKG

SEQ ID NO: 7408 - protein, 992 aa, Helicobacter pylori
  misc_feature (B) LOCATION 1...992
  hypothetical: YES
MMKTEREVQNQVIETFKAMGYAYLGDLTKSDNENINKESLKAWLIKNQKIEPERWHKIEQEIHTALKNDLYEANQKFYELLIYGVKTKISLNENTQTHWLIDWKDVSKNEFSVAEEVSAKGPNMKRPDIVLYVNGIALGVLELKKSSVSVESGIRQNLDNQKKEFIRDFFKTIQLVMAGNESQGLKYGVIETEEKYYLSWKEEGVQKNLFETIECFLDKKRFLEFIHDFLIFDKGQKKCARFHQYFAIKKTQEFIQRKEGGIIWHTQGSGKSLTMVWLTRWIRRNIKQARVLIVTDRRELDAQIQGVFQGIGEKIYRADSKKDLLSVLFENKKFLVGSLVHKFDDNDLEDLKKQPVLKEWIVLVDECHRTQSGKLHKAMKSLLPNAIFIAFSGTPLLKQDKKTSQEVFGDYIHCYKFNEAVSDKVVLDLNYEARSVEQYVSSPEKLDEYFELKTQNLNEAAKTELKKKWVNLQKVFSTKDRLEHIVQDIVLDMAKLPRLSNGKGNAMLVAESVYNACRYFELFLETELKDKVAVITSYEPNIADLKDCGSNESEESYKYRAYCKMLQNFFNEKDEKKALNKIKEFEEEVKKRFINEPARMKLLIVVDKLLTGFDAPSLTYLYIDKRMQDHGLFQAVCRVNRLDGEDKDFGCIIDYSDLFDSLQEAHSDYTNGAFENYEREDIQGLISDKSQKIKKKLEETRDQLKSLCESVKEPKDEEDYIAYFCGDNLEKNAQKRRLFYQLVGAFLRMFVELNNLEKPIYSKEETQQIKQEAGFYRHLQKVVGLSSGDSVDLKSYNEDMRRILDAYIKTTDSEVLFQIEDQGLCEVLAQMDINDFNKALSQVFKNESSMAESIANNTRKRIIEKEASDPKYYEKLSSLLNDLILQFREKKLTYLEYLQQIQDLAKKVIDKEDRNYPKKINTKALKTLYDNLDENEALALETDACIRGNKKDGWVGHNQKEKNLKIALRKIINDEVLLENIFNLAKHIEEYH

SEQ ID NO: 7409 - protein, 969 aa, Helicobacter pylori
  misc_feature (B) LOCATION 1...969
  hypothetical: YES
VKIKFKRLDYQEQCRDQILGVFKGIDLREPENDIQRIANPVFEIGAIKDLLLENIENLRSKQKITQGSVGINQSLNCDILMETGTGKTFCFLECVYALHKNYHLSKFIVLAPSNAIKLGVLKSIEITREFFKSEYSNTHLESYEDVERFILASNHKCCVLVMTFSAFNKEKNTINQSCLENTNLFNGAKSYMQALASMRPIVIMDEPHRFLGDKTKKYLEQLNALITLRFGATFKDDYHNLIYALDSKKAFDCALVKSISVASVGESDEYFLELKEANKKQNEATINYTTLENKIQSVKVKTHDNLGALTHISALEDYIVEKITKTEIRFLNGFNLLLDQKEPFSHLLEGEQEVMLKEAIKSHFEREEGLFKKGIKALCMVFINGVNSYLSENEKPAKLALLFEKLYQQKLEEVLKKPLDENYRAYLERTKDAILKVHGGYFAKSKKESDEVQVIALILKEKEKLLSFDSDLRFIFSQWALQEGWDNPNVMTICKLAPSSSNITKLQQIGRGLRLAVNDKGERITKEHADFDFVNELVVIVPQVEGDFVGAIQQEISEHSLIKQVFSAEELEKSGMVKKGYYGVLFETLEGLGFGEKTDDENFKLTLNQNEFLKKEPELEKLKDEKYLDFEKLKDFLKDRLIGHFRVRNKNERKTEKIKINKENFKKFETLWAGLNHQARIAYAIDSESLIDEIVKNINSSFNVSSKIVSVTTHKKVETMGNNAKTEIFERKSACVWSLHEFISALSNKVKLSFKSVAKVLENIDENKFNEIKKNEQEGLKRLEELFLEIIYQNIKDKISYQMRETTIKNRKNDAFYDEKGEIREFLDGSLGADKYEIKNSSAQEKCLYENFMQVDSEIEKDTIEESNDTKIIVFGKLPRVKIPIGLNQTYSPDFGYVVENNDKKVLLVVETKGVDKKSELRPEEKRKISTAKKFFEALKKQGVNIEYKTKLNNDQLSALINEVLNRKD

SEQ ID NO: 7410 - protein, 972 aa, Helicobacter pylori
  misc_feature (B) LOCATION 1...972
  hypothetical: YES
GVEVKIKFKRLDYQEQCRDQILGVFKGIDLREPENDIQRIANPVFEIGAIKDLLLENIENLRSKQKITQGSVGINQSLNCDILMETGTGKTFCFLECVYALHKNYHLSKFIVLAPSNAIKLGVLKSIEITREFFKSEYSNTHLESYEDVERFILASNHKCCVLVMTFSAFNKEKNTINQSCLENTNLFNGAKSYMQALASMRPIVIMDEPHRFLGDKTKKYLEQLNALITLRFGATFKDDYHNLIYALDSKKAFDCALVKSISVASVGESDEYFLELKEANKKQNEATINYTTLENKIQSVKVKTHDNLGALTHISALEDYIVEKITKTEIRFLNGFNLLLDQKEPFSHLLEGEQEVMLKEAIKSHFEREEGLFKKGIKALCMVFINGVNSYLSENEKPAKLALLFEKLYQQKLEEVLKKPLDENYRAYLERTKDAILKVHGGYFAKSKKESDEVQVIALILKEKEKLLSFDSDLRFIFSQWALQEGWDNPNVMTICKLAPSSSNITKLQQIGRGLRLAVNDKGERITKEHADFDFVNELVVIVPQVEGDFVGAIQQEISEHSLIKQVFSAEELEKSGMVKKGYYGVLFETLEGLGFGEKTDDENFKLTLNQNEFLKKEPELEKLKDEKYLDFEKLKDFLKDRLIGHFRVRNKNERKTEKIKINKENFKKFETLWAGLNHQARIAYAIDSESLIDEIVKNINSSFNVSSKIVSVTTHKKVETMGNNAKTEIFERKSACVWSLHEFISALSNKVKLSFKSVAKVLENIDENKFNEIKKNEQEGLKRLEELFLEIIYQNIKDKISYQMRETTIKNRKNDAFYDEKGEIREFLDGSLGADKYEIKNSSAQEKCLYENFMQVDSEIEKDTIEESNDTKIIVFGKLPRVKIPIGLNQTYSPDFGYVVENNDKKVLLVVETKGVDKKSELRPEEKRKISTAKKFFEALKKQGVNIEYKTKLNNDQLSALINEVLNRKD

SEQ ID NO: 7411 - protein, 815 aa, Helicobacter pylori
  misc_feature (B) LOCATION 1...815
  hypothetical: YES
MAIKKSELYSSLWAGADSLRGGMDASEYKNYVLNLLFLKYISDKAKNNMDSEIEVPQGCFYEDILALEGDKEIGDKLNKIIAKIAERNDLKGVIDSVDFNDNTKLGEGKAMIDTLSNLVKIFADLSLGAHGALDDDLLGDAYEYLMRHFASESGKSKGQFYTPSEVSLLLSLLLGIDENTRQDKSIYDPTCGSGSLLLKASSLAGKKGLTIYGQEKDISTTALCKMNMILHNSATADIAKGGSSTLSNPLFTTENGMLKTFDYVVANPPFSLKNWTDGLSIDPKSKQVINDSFNRFEDGTPPEKNGDFAFLLHIIKSLNPTGKGAVILPHGVLFRGNAEAQIRKNLLMKGYIKGVIGLAPNLFYGTSIPACVIVLDKENAHARKGVFVIDASKDFKKDGNKNRLREQDVQKMIDTFNALKEIPYYSKMVSLEEISLNDYNLNIPRYIAAKQELEKDLFALINSPSYLPKNEIKAYDPYFQVFKELKNTLFKKSDKEGYYALKTECENIKDLITQSLEYQTFHASVLSAFESLDLFTTFNDLEPGFNPKTLIESVCSKVLKEFEKVGILDKYGVYQLFKDYYNEVLQDDWFLISFNGFRSAKELRKLTPLKDKNKKANYLEEPDFIVQKTYYKSDLIPKHLIKQRFFEKETKELEELENALNEKEALLDEFIEEHSNEEGLFDGLKINESVLKKELKNATDLEDKQILKTALEWLEAKNKALKMKNKAYEELELKAFHQYKNLEINEIKDLIIKDKWLNSLKNALENKIQKRTNAFASALNEIISSYSNSLLELDKEVKESESKVLEHLKDLGLMG

SEQ ID NO: 7412 - protein, 842 aa, Helicobacter pylori
  misc_feature (B) LOCATION 1...842
  hypothetical: YES
TSLSVFIINPLRTLFTALYYNPKNKIGRLKMAIKKSELYSSLWAGADSLRGGMDASEYKNYVLNLLFLKYISDKAKNNMDSEIEVPQGCFYEDILALEGDKEIGDKLNKIIAKIAERNDLKGVIDSVDFNDNTKLGEGKAMIDTLSNLVKIFADLSLGAHGALDDDLLGDAYEYLMRHFASESGKSKGQFYTPSEVSLLLSLLLGIDENTRQDKSIYDPTCGSGSLLLKASSLAGKKGLTIYGQEKDISTTALCKMNMILHNSATADIAKGGSSTLSNPLFTTENGMLKTFDYVVANPPFSLKNWTDGLSIDPKSKQVINDSFNRFEDGTPPEKNGDFAFLLHIIKSLNPTGKGAVILPHGVLFRGNAEAQIRKNLLMKGYIKGVIGLAPNLFYGTSIPACVIVLDKENAHARKGVFVIDASKDFKKDGNKNRLREQDVQKMIDTFNALKEIPYYSKMVSLEEISLNDYNLNIPRYIAAKQELEKDLFALINSPSYLPKNEIKAYDPYFQVFKELKNTLFKKSDKEGYYALKTECENIKDLITQSLEYQTFHASVLSAFESLDLFTTFNDLEPGFNPKTLIESVCSKVLKEFEKVGILDKYGVYQLFKDYYNEVLQDDWFLISFNGFRSAKELRKLTPLKDKNKKANYLEEPDFIVQKTYYKSDLIPKHLIKQRFFEKETKELEELENALNEKEALLDEFIEEHSNEEGLFDGLKINESVLKKELKNATDLEDKQILKTALEWLEAKNKALKMKNKAYEELELKAFHQYKNLEINEIKDLIIKDKWLNSLKNALENKIQKRTNAFASALNEIISSYSNSLLELDKEVKESESKVLEHLKIWG

SEQ ID NO: 7413 - protein, 164 aa, Helicobacter pylori
  misc_feature (B) LOCATION 1...164
  hypothetical: YES
MKQEKYFLTSSLSLLSFLLCPVEAFDYRFSGRVENFSKIGFNNSQINTKKGIYPTESFIDIVTLAQVKVNLLPKGTENHRLSVSLGGAIAAIPYDKTKYYINQANGKVFGSIVENFIGGYHGYFFNKYLGPAYAGTSQSASYHARPYVVDTAFLRYDYQRCFWV

SEQ ID NO: 7414 - protein, 204 aa, Helicobacter pylori
  misc_feature (B) LOCATION 1...204
  hypothetical: YES
KDTALFYKTKDLYYVKSETIYKDFCFELEGILFNFDTSLLESKKYNEKVDLIFDLKSIVKDKDTKTNTLNFSVTLSSKGTQTKTNEILKECSNQGVKLDEEILKKAFVKFKKQGSMDYFIHKNAQGFLKEQLDLYLFEYLFKEMTAFDHKRLNGINTIKEVALEVIALVSEFENELCKIWNKPRLVLNSHFIVSLDKLKAKTTI

SEQ ID NO: 7415 - protein, 485 aa, Helicobacter pylori
  misc_feature (B) LOCATION 1...485
  hypothetical: YES
DLEQTPLGVKLAFHRKPRQIESQNYDLSKITNHPNYPKQVKEWQDLNLEIADYLLGREFLPLDTLYFKDLEEEVKSLFNENEINGTLIKSENYQALNSLKNRYKEAIDCIYIDPPFNTGSDFAYIDRFQDSTWLSLMHNRLQLAYDFLSPQGNFYLHLDYRANYLGRMLLNDIFSKENFRNEIIWHFRTYQGQIQSNFPRKHDSLLWYSKNCNVNNFFKITYSDNYKDTVDYRRWREFIVDNNKIVYPNYPKADSRFDGYLKRYLQSTKEPKNGDIIATINGYVIDDVWTDIQAIDPKKADERLQGTLTQKPEKLLERIIKASSNENSIVCDFFAGSGTTCAVAHKLKRKYIGVEMGEHFESVILPRLKKVIGGFKSGALKEFNGGGVIKVYELESYEEILRKIKYEDNDKPLAYEEQYSDLVERKNESYTLNIEALENMGVDIKETLENLHGVGVEFFNEKVVKFKGNDKEVSILKALKEALIW

SEQ ID NO: 7416 - protein, 649 aa, Helicobacter pylori
  misc_feature (B) LOCATION 1...649
  hypothetical: YES
VKSETIYKDFCFELEGILFNFDTSLLESKKYNEKVDLIFDLKSIVKDKDTKTNTLNFSVTLSSKGTQTKTNEILKECSNQGVKLDEEILKKAFVKFKKQGSMDYFIHKNAQGFLKEQLDLYLFEYLFKEMTAFDHKRLNGINTIKEVALEVIALVSEFENELCKIWNKPRLVLNSHFIVSLDKLKAKNYDLSKITNHPNYPKQVKEWQDLNLEIADNLLGNEFLPLDTLYFKDLEEEVKSLFNENEINGTLIKSENYQALNSLKNRYKEAIDCIYIDPPFNTGSDFAYIDRFQDSTWLSLMHNRLQLAYDFLSPQGNFYLHLDYRANYLGRMLLNDIFSKENFRNEIIWHFRTYQGQIQSNFPRKHDSLLWYSKNCNVNNFFKITYSDNYKDTVDYRRWREFIVDNNKIVYPNYPKADSRFDGYLKRYLQSTKEPKNGDIIATINGYVIDDVWTDIQAIDPKKADERLQGTLTQKPEKLLERIIKASSNENSIVCDFFAGSGTTCAVAHKLKRKYIGVEMGEHFESVILPRLKKVIGGFKSGALKEFNGGGVIKVYELESYEEILRKIKYEDNDKPLAYEEQYSDLVERKNESYTLNIEALENMGVDIKETLENLHGVGVEFFNEKVVKFKGNDKEVSILKALKEALIW

SEQ ID NO: 7417 - protein, 218 aa, Helicobacter pylori
  misc_feature (B) LOCATION 1...218
  hypothetical: YES
KRSNDYKRIKMDHLKHLQQLQNIERIVLSGIVLANHKIEEIHSVLEPSDFYYPPHGLFFEIALKLHEVNCPIDENFIRQKMPKDKQISEDDLVAIFAASPIDNIEAYVEEIKNASIKRKLFTLANTIREQALESAQKSSDILNAVEREVYALLNGSTIEGFRGIKEVLESTMNLITENQRKGSLKVTGIPTGFVQLDNYTSGFNQGSLVISGARPVHG

SEQ ID NO: 7418 - protein, 288 aa, Helicobacter pylori
  misc_feature (B) LOCATION 1...288
  hypothetical: YES
SFQGQGPFMGKTSLMMNMVLSALNDDRGVAVFSLEMSAEQLALRALSDLTSINMHDLESARLDDDQWENLAKCFDHLSQKKLFFYDKSYVRMDQIRLQLRKLKSQHKELGIAFIDYLQLMSGNKATKERHEQIAEISRELKTLARELEIPIIALVQLNRSLENRDDKRPILSDIKDSGGIEQDADIVLFLYRGYIYQMRAEDNKIDKLKKEGKVEEAQELHLKVNEERRIHKQNGSIEEAEIIVAKNMNGATGTVYTRFNAPFTRYEDMPVDSHLEEGQETKFEMPTT

SEQ ID NO: 7419 - protein, 486 aa, Helicobacter pylori
  misc_feature (B) LOCATION 1...486
  hypothetical: YES
MDHLKHLQQLQNIERIVLSGIVLANHKIEEIHSVLEPSDFYYPPHGLFFEIALKLHEVNCPIDENFIRQKMPKDKQISEDDLVAIFAASPIDNIEAYVEEIKNASIKRKLFTLANTIREQALESAQKSSDILNAVEREVYALLNGSTIEGFRGIKEVLESTMNLITENQRKGSLKVTGIPTGFVQLDNYTSGFNQGSLVILGARPSMGKTSLMMNMVLSALNDDRGVAVFSLEMSAEQLALRALSDLTSINMHDLESARLDDDQWENLAKCFDHLSQKKLFFYDKSYVRMDQIRLQLRKLKSQHKELGIAFIDYLQLMSGNKATKERHEQIAEISRELKTLARELEIPIIALVQLNRSLENRDDKRPILSDIKDSGGIEQDADIVLFLYRGYIYQMRAEDNKIDKLKKEGKVEEAQELHLKVNEERRIHKQNGSIEEAEIIVAKNRNGATGTVYTRFNAPFTRYEDMPVDSHLEEGQETKFEMPTT

SEQ ID NO: 7420 - protein, 359 aa, Helicobacter pylori
  misc_feature (B) LOCATION 1...359
  hypothetical: YES
MDFLKENLNTIIEGDCLEKLKDFPNKSVDFIFADPPYFMQTEGELKRFEGTKFQGVEDHWDKFGSFEEYDTFCLGWLKECQRILKDNGSICVIGSFQNIFRIGFHLQNLGFWILNDIVWHKSNPVPNFAGKRLCNAHETLIWCAKHKNSKVTFNYKTMKYLNNDKQEKSVWQIPICMGNERLKDVQGKKVHSTQKPEALLKKIILSATKPKDIILDPFFGTGTTGAVAKSMDRYFIGIEKDSFYIKEAAKRLNSTRDKSDFITNLELETKPPKIPMSLLISKQLLKIGDFLYSSNKEKICQVLENGQVRDNENYETSIHKMSAKYLNKTNHNGWKFFYAYYQNQFLLLDELRYICQRDS

SEQ ID NO: 7421 - protein, 404 aa, Helicobacter pylori
  misc_feature (B) LOCATION 1...404
  hypothetical: YES
SIMDFLKENLNTIIEGDCLEKLKDFPNKSVDFIFADPPYFMQTEGELKRFEGTKFQGVEDHWDKFGSFEEYDTFCLGWLKECQRILKDNGSICVIGSFQNIFRIGFHLQNLGFWILNDIVWHKSNPVPNFAGKRLCNAHETLIWCAKHKNSKVTFNYKTMKYLNNDKQEKSVWQIPICMGNERLKDVQGKKVHSTQKPEALLKKIILSATKPKDIILDPFFGTGTTGAVAKSMDRYFIGIEKDSFYIKEAAKRLNSTRDKSDFITNLELETKPPKIPMSLLISKQLLKIGDFLYSSNKEKICQVLENGQVRDNENRGKHKQRDPPSPPPLFRRPPLFLFFPPHPPPPGGGSFFSHPLFFFFIMKNTPRGARSGSRPPPNNIYFFFGWGAPPTKISTPPTPGDFN

SEQ ID NO: 7422 - protein, 107 aa, Helicobacter pylori
  misc_feature (B) LOCATION 1...107
  hypothetical: YES
RITRTHAKRIFKTLPRTKRMKLFDYAPLSLAWREFLQSEFKKPYFLEIEKRYLEALKSPKTIFPKSSNLFCAFNLTPPYAVKIILLGQDPYHSTYLENEQECRWRWA

SEQ ID NO: 7423 - protein, 186 aa, Helicobacter pylori
  misc_feature (B) LOCATION 1...186
  hypothetical: YES
MKLFDYAPLSLAWREFLQSEFKKPYFLEIEKRYLEALKSPKTIFPKSSNLFCAFNLTPPYAVKIILLGQDPYHSTYLENEQELPVAMGLSFSVEKNAPIPPSLKNIFKELHANLGVPVPCCGDLSAWAKRGMLLLNAILSVEKNQAASHKYIGWEAFSDQILIRLFETTTPLIVVLLGKVAQKRSR

SEQ ID NO: 7424 - protein, 233 aa, Helicobacter pylori
  misc_feature (B) LOCATION 1...233
  hypothetical: YES
MKLFDYAPLSLAWREFLQSEFKKPYFLEIEKRYLEALKSPKTIFPKSSNLFCAFNLTPPYAVKIILLGQDPYHSTYLENEQELPVAMGLSFSVEKNAPIPPSLKNIFKELHANLGVPVPCCGDLSAWAKRGMLLLNAILSVEKNQAASHKYIGWEAFSDQILIRLFETTTPLIVVLLGKVAQKKIALIPKNKHIIITAPHPSPLSRGFLGSGVFTSVQKAYREVYRKDFDFSL

SEQ ID NO: 7425 - protein, 193 aa, Helicobacter pylori
  misc_feature (B) LOCATION 1...193
  hypothetical: YES
MNTYKNSLNHFLNLVDCLEKIPNVGKKSAFKMAYHLGLENPYLALKITHALRNALENLKTCASCNALSETEVSEICSDESRQNSQLCMVLHPRDVFILEDLKDFLGRYYVLNSIEDVDFNALEKRLIGENIKEIIFAFPPTLANDSLMLYIEDKLQHLHLTFTKIAQGVPTGVNFENIDSVSLSRAFNSRIKA

SEQ ID NO: 7426 - protein, 196 aa, Helicobacter pylori
  misc_feature (B) LOCATION 1...196
  hypothetical: YES
YTNRMNTYKNSLNHFLNLVDCLEKIPNVGKKSAFKMAYHLGLENPYLPLNDHARFRNAQEPNPFASCNASARLRSCEICSDESRPNSQLCMVLHPRDVFILEDLKDFLGRYYVLNSIEDVDFNALEKRLIGENIKEIIFAFPPTLANDSLMLYIEDKLQHLHLTFTKIAQGVPTGVNFENIDSVSLSRAFNSRIKA

SEQ ID NO: 7427 - protein, 147 aa, Helicobacter pylori
  misc_feature (B) LOCATION 1...147
  hypothetical: YES
LTKLQYEVTQNKHSEKPFENEYYNQEEEGIYVDITTGEPLFSSADKYDSGCGWPSFSKPINKDVVKYEDDESLNRKRIEVLSRIGKAHLGHVFNDGPKELGGLRYCINSAALRFIPLKDMEKEGYGEFIPYIKKGELKKYIQDKKSH

SEQ ID NO: 7428 - protein, 177 aa, Helicobacter pylori
  misc_feature (B) LOCATION 1...177
  hypothetical: YES
LPKTDERVIYLAGGCFWGLEAYMERIYGVIDASSGYANGKTSSTNYEKLHESDHAESVKVIYDPKKISLDKLLRYYFKVIDPVSVNKQGNDVGRQYRTGIYYVNSADKEVIDNALKALQKEVKGKIAIEVEPLKNYVRAEEYHQDYLKKHPGGYCHIDLKKADEVIVDDDKYSLHHG

SEQ ID NO: 7429 - protein, 175 aa, Helicobacter pylori
  misc_feature (B) LOCATION 1...175
  hypothetical: YES
PKTDERVIYLAGGCFWGLEAYMERIYGVIDASSGYANGKTSSTNYEKLHESDHAESVKVIYDPKKISLDKLLRYYFKVIDPVSVNKQGNDVGRQYRTGIYYVNSADKEVIDNALKALQKEVKGKIAIEVEPLKNYVRAEEYHQDYLKKHPGGYCHIDLKKADEVIVDDDKYSLHH

SEQ ID NO: 7430 - protein, 361 aa, Helicobacter pylori
  misc_feature (B) LOCATION 1...361
  hypothetical: YES
LSMKILSYLKKFYLFLLIGAIMQANESMGAKLPKTDERVIYLAGGCFWGLEAYMERIYGVIDASSGYANGKTSSTNYEKLHESDHAESVKVIYDPKKISLDKLLRYYFKVIDPVSVNKQGNDVGRQYRTGIYYVNSADKEVIDNALKALQKEVKGKIAIEVEPLKNYVRAEEYHQDYLKKHPGGYCHIDLKKADEVIVDDDKYTKPSDEVLKKKLTKLQYEVTQNKHTEKPFENEYYNKEEEGIYVDITTGEPLFSSADKYDSGCGWPSFSKPINKDVVKYEDDESLNRKRIEVLSRIGKAHLGHVFNDGPKELGGLRYCINSAALRFIPLKDMEKEGYGEFIPYIKKGELKKYIQDKKSH

SEQ ID NO: 7431 - protein, 173 aa, Helicobacter pylori
  misc_feature (B) LOCATION 1...173
  hypothetical: YES
GRLTRNVELKYLPSGSAAATIGLATSRRFKKQDGTLGEEVCFIDARLLGRTAEIANQYLSKGSSVLIEGRLTYESWMDQTGKKNSRHTITADSLQFMDKKSDNPQANSMQDSMTHENFNNAYPTNYNAPSQDPFSQAQSYPQNAYTKENSQAQPSKYQNSVPEINIDEEEIPF

SEQ ID NO: 7432 - protein, 181 aa, Helicobacter pylori
  misc_feature (B) LOCATION 1...181
  hypothetical: YES
MFNKVIMVGRLTRNVELKYLPSGSAAATIGLATSRRFKKQDGTLGEEVCFIDARLFGRTAEIANQYLSKGSSVLIEGRLTYESWMDQTGKKNSRHTITADSLQFMDKKSDNPQANSMQDSMTHENFNNAYPTNYNAPSQDPFSQAQSYPQNAYTKENSQAQPSKYQNSVPEINIDEEEIPF

SEQ ID NO: 7433 - protein, 329 aa, Helicobacter pylori
  misc_feature (B) LOCATION 1...329
  hypothetical: YES
MNYIGSKYKLIPFIKENIHAVAGHDLSGAIFCDLFAGTGIVGRTFKKAVNKVISNDLEYYSFVLNQNYIGNIQEIPNKEELINKINSVALKKGFIYSHYSLGGSSRQYFSETNAQKIDAMRLKIEELKLSQNIDNHSYYFLLASLLESADKVANTASVYGAFLKRLKKSAQKELILKGAHFDVSLNANEVYQQDSNDLIGKISGDILYLDPPYNARQYGANYHLLNTIAAYTPFTPKGKTDLPSYQKSSFCSRFQILNAFENLIKKARFKYIFLSYNNEGLMSETEIKNILKKYGAYSLVTKTYMRFKADNKRAHKAVHTKECLHVLIK

SEQ ID NO: 7434 - protein, 353 aa, Helicobacter pylori
  misc_feature (B) LOCATION 1...353
  hypothetical: YES
MLQYIKFNFNNSHIYFKEAYKHRSMNYIGSKYKLIPFIKENIHAVAGHDLSGAIFCDLFAGTGIVGRTFKKAVNKVISNDLEYYSFVLNQNYIGNIQEIPNKEELINKINSVALKKGFIYSHYSLGGSSRQYFSETNAQKIDAMRLKIEELKLSQNIDNHSYYFLLASLLESADKVANTASVYGAFLKRLKKSAQKELILKGAHFDVSLNANEVYQQDSNDLIGKISGDILYLDPPYNARQYGANYHLLNTIAAYTPFTPKGKTDLPSYQKSSFCSRFQILNAFENLIKKARFKYIFLSYNNEGLMSETEIKNILKKYGAYSLVTKTYMRFKADNKRAHKAVHTKECLHVLIK

SEQ ID NO: 7435 - protein, 364 aa, Helicobacter pylori
  misc_feature (B) LOCATION 1...364
  hypothetical: YES
SWGLRLIHNQVMLQYIKFNFNNSHIYFKEAYKHRSMNYIGSKYKLIPFIKENIHAVAGHDLSGAIFCDLFAGTGIVGRTFKKAVNKVISNDLEYYSFVLNQNYIGNIQEIPNKEELINKINSVALKKGFIYSHYSLGGSSRQYFSETNAQKIDAMRLKIEELKLSQNIDNHSYYFLLASLLESADKVANTASVYGAFLKRLKKSAQKELILKGAHFDVSLNANEVYQQDSNDLIGKISGDILYLDPPYNARQYGANYHLLNTIAAYTPFTPKGKTDLPSYQKSSFCSRFQILNAFENLIKKARFKYIFLSYNNEGLMSETEIKNILKKYGAYSLVTKTYMRFKADNKRAHKAVHTKECLHVLIK

SEQ ID NO: 7436 - protein, 148 aa, Helicobacter pylori
  misc_feature (B) LOCATION 1...148
  hypothetical: YES
AMKKLKNTWALTTRPISKRNIKYGFYHHQLCNRTEEFALKQVAKQATSSLMYRLGKTLILASVCVEREPVSEDFLPLVVQFLEKSYAAGKIPGGFVKREGRAQDFEILTSRLIDRTLRPLFPKDYRYPTQITLMVLNHDIETICKFLL

SEQ ID NO: 7437 - protein, 189 aa, Helicobacter pylori
  misc_feature (B) LOCATION 1...189
  hypothetical: YES
PCASLLNQSSLDLFVSGTKESLNMIEMRSLGQKLNALEEPLMLEALELAQKSLKETCALYEEAFTPYQNEFLFKEGEGIVLNERLLDLLKNQYFDEIIKGIESSALSERENVFREVAKKICEAHSEFSLEEIELSLEKVKKTEIRRMIIQDKIRPDKRALEEVRPISIESNLLPMAHSSILLLGGKLKA

SEQ ID NO: 7438 - protein, 197 aa, Helicobacter pylori
  misc_feature (B) LOCATION 1...197
  hypothetical: YES
ARVRRSAAHFNREQLAPYGTQLHFITRGQTQSLVVGVLGMDNDAQTHENLEHKAPIKERFMFHYNFPPFCVGEASSIGATSRRELGHGNLAKRALETSIKNKEQVIRLVSEILESNGPSSMASVCAGSLALYASGVEIHDLVAGVAMGMVSERQDHAILSDISGLEDAEGDMDFKIAGNLEGITAMQMDTKMSGIQW

SEQ ID NO: 7439 - protein, 349 aa, Helicobacter pylori
  misc_feature (B) LOCATION 1...349
  hypothetical: YES
MDFITINSGNRTEEFALKQVAKQATSSLMYRLGKTLILASVCVEREPVSEDFLPLVVQFLEKSYAAGKIPGGFVKREGRAQDFEILTSRLIDRTLRPLFPKDYRYPTQITLMVLNHDIENDLQVSALNAASATLFLAHIAPIKSVSACRIARVDNEFIINPSASLLNQSSLDLFVSGTKESLNMIEMRSLGQKLNALEEPLMLEALELAQKSLKETCALYEEAFTPYQNELLFKEGEGIVLNERLLDLLKNQYFDEIIKGIESSALSERENVFKEVAKKISEAHSEFSLEEIELSLEKVKKTEIRRMIIQDKIRPDKRALEEVRPISIESNLLPMAHSSILLLGGKLKA

SEQ ID NO: 7440 - protein, 699 aa, Helicobacter pylori
  misc_feature (B) LOCATION 1...699
  hypothetical: YES
QRAQSQKGTLNMDFITINSGNRTEEFALKQVAKQATSSLMYRLGKTLILASVCVEREPVSEDFLPLVVQFLEKSYAAGKIPGGFVKREGRAQDFEILTSRLIDRTLRPLFPKDYRYPTQITLMVLNHDIENDLQVSALNAASATLFLAHIAPIKSVSACRIARVDNEFIINPSASLLNQSSLDLFVSGTKESLNMIEMRSLGQKLNALEEPLMLEALELAQKSLKETCALYEEAFTPYQNELLFKEGEGIVLNERLLDLLKNQYFDEIIKGIESSALSERENVFKEVAKKISEAHSEFSLEEIELSLEKVKKTEIRRMIIQDKIRPDKRALEEVRPISIESNLLPMAHSSILFTRGQTQSLVVGVLGMDNDAQTHENLEHKAPIKERFMFHYNFPPFCVGEASSIGATSRRELGHGNLAKRALETSIKNKEQVIRLVSEILESNGSSSMASVCAGSLALYASGVEIHDLVAGVAMGMVSERQDHAILSDISGLEDAEGDMDFKIAGNLEGITAMQMDTKMSGIQLEVLYQALLQAKRARKHILKIMHEAKEKIVINFSHLPQTEIFNVAPDKIIEIIGQGGRVIKEIVEKFEVKIDLNTPSGEVKIMGNKERVLKTKEFILNYLHSLDQELEQYAIDEVLEAQVKRIVDFGAFLSLPKGGEGLLRKQNMDKCQVILKEGDSIRCRVISFNKGKIALDLA

SEQ ID NO: 7441 - protein, 109 aa, Helicobacter pylori
  misc_feature (B) LOCATION 1...109
  hypothetical: YES
GCFVKNSNRLIYTDNLEESLEEAASLFKHHIKFYTEIIEKDKKVIKTFNKDFKIEHAKEVISKAHLKHSELNAFLIAAPSYGVEAQKALLLMLEAPPMSLRDAFLTLSP

SEQ ID NO: 7442 - protein, 124 aa, Helicobacter pylori
  misc_feature (B) LOCATION 1...124
  hypothetical: YES
NNVCFIMFAKSPNHVLATIKSRLIKEDKRQKIPLKPLDLDLSKLDLKDIYAFLKNLDKENFDSRENQRERIESLLESIHRHKIPLNEQELQAFDLAIKANSSYYKLSYNLLPLLLSLLSKKKTP

SEQ ID NO: 7443 - protein, 123 aa, Helicobacter pylori
  misc_feature (B) LOCATION 1...123
  hypothetical: YES
NVCFIMFAKSPNHVLATIKSRLIKEDKRQKIPLKPLDLDLSKLDLKDIYAFLKNLDKENFDSRENQRERIESLLESIHRHKIPLNEQELQAFDLAIKANSSYYKLSYNLLPLLLSLLSKKKTP

SEQ ID NO: 7444 - protein, 218 aa, Helicobacter pylori
  misc_feature (B) LOCATION 1...218
  hypothetical: YES
VKNSNRLIYTDNLEESLEEAASLFKHHIKFYTEIIEKDKKVIKTFNKDFKIEHAKEVISKAHLKHSELNAFLIAAPSYGVEAQNALLKILEEPPNNVCFIMFAKSPNHVLATIKSRLIKEDKRQKIPLKPLDLDLSKLDLKDIYAFLKNLDKENFDSRENQRERIESLLESIHRHKIPLNEQELQAFDLAIKANSSYYKLSYNLLPLLLSLLSKKKTP

SEQ ID NO: 7445 - protein, 234 aa, Helicobacter pylori
  misc_feature (B) LOCATION 1...234
  hypothetical: YES
VSFRVRMRVELNFRSVKMQVSQYLYQNAQSIWGDCISHPFVQGIGRGTLERDKFRFYIIQDYLFLLEYAKVFALGVVKACDEAVMREFSNAIQDILNNEMSIHNHYIRELQITQKELQNACPTLANKSYTSYMLAEGFKGSIKEVAVAVLACGWSYLVIAQNLSQIPNALEDAFYGHWIKGYSSKEFQACVTWNINLLDSLALASSKQEIEKLKEIFIATSEYEYQFWDMAYQS

SEQ ID NO: 7446 - protein, 94 aa, Helicobacter pylori
  misc_feature (B) LOCATION 1...94
  hypothetical: YES
MNKAEFIDLVKKAGKYNSKREAEEAINAFTLAVETALSKGESVELVGFGKFETAEQKGKEGKVPGSDKTYKTEDKRVPKFKPGKILKQKVEEGK

SEQ ID NO: 7447 - protein, 112 aa, Helicobacter pylori
  misc_feature (B) LOCATION 1...112
  hypothetical: YES
AKRLNRLVLASIRKGVIHMNKAEFIDLVKKAGKYNSKREAEEAINAFTLAVETALSKGESVELVGFGKFETAEQKGKEGKVPGSDKTYKTEDKRVPKFKPGKILKQKVEEGK

SEQ ID NO: 7448 - protein, 205 aa, Helicobacter pylori
  misc_feature (B) LOCATION 1...205
  hypothetical: YES
NEFEIFFKRNNMNYETIAESNESTVVAEFHSDSERKSAYESEAQLEREFIALLQKQGYEFKKIHNEKELKDNLKEQLEKLNDHCFTPKEWDTLYFQFIANKNEDYKAKTRKIQEDPIFNLALENGKTKNIKIIDKKNIHRNALQVIHQYSNKGGKYENRYDVSVLVNGLPLVHVELKKRGVAIREAFNQIKRYKRDSFSAEARAF

SEQ ID NO: 7449 - protein, 281 aa, Helicobacter pylori
  misc_feature (B) LOCATION 1...281
  hypothetical: YES
DSVKTHGNIVCFRDLEQDLNDALMLFGNKDARSIALLRKYEDYLKGYADNNKEYEGYEGLIERLLTEFPLKEPIISESQKKDFIKLFGKILKLENILNSFENFNKDDHINPRDFQDYQSKYLDFYDEMRPEKGRDKEEINDDLIFEIELIKQVEVNIDYILTLIEKYAKEPDLEIQGVKTQIEPILNSSIELRNKKDLIMGFIDKYNKDEEVHAYFQNYIHQKREEEFQNIIEENRLNEEKAYSFMQHAFSGGEINFSGTEFPEIIEEKVSRFDKIRAIKR

SEQ ID NO: 7450 - protein, 280 aa, Helicobacter pylori
  misc_feature (B) LOCATION 1...280
  hypothetical: YES
SVKTHGNIVCFRDLEQDLNDALMLFGNKDARSIALLRKYEDYLKGYADNNKEYEGYEGLIERLLTEFPLKEPIISESQKKDFIKLFGKILKLENILNSFENFNKDDHINPRDFQDYQSKYLDFYDEMRPEKGRDKEEINDDLIFEIELIKQVEVNIDYILTLIEKYAKEPDLEIQGVKTQIEPILNSSIELRNKKDLIMGFIDKYNKDEEVHAYFQNYIHQKREEEFQNIIEENRLNEEKAYSFMQHAFSGGEINFSGTEFPEIIEEKVSRFDKIRAIKR

SEQ ID NO: 7451 - protein, 334 aa, Helicobacter pylori
  misc_feature (B) LOCATION 1...334
  hypothetical: YES
GFNGFCQVVFARRSLLNVLTRYCVFTSEEVLLVMRPYQIVAAERILEKIKATHDSKTYGKSQSGGYIWHTTGSGKTLTSFKSATLAKELEHVSKVLFVVDRKDLDYQTMKEYDKFQKDCANSNTSTKILKQQLEDFNAKIIITTIQKLDKFVIAHLKGHAIFNEEVVMIVDECHRSQLGLMHQAITKAFKKYHLFGFTGTPIFAQNCDKNNPLGTTEQKFGRCLHQYTIIDAIRDKNVLPFRVEYHNTIKAKEGIKDKEGIKDKEVRAVDEKNALLDSRRIKEIAKCILERFHQATKNKKFNSILACSGIEALKKYYQAFKEEKHDLKIATIFS

SEQ ID NO: 7452 - protein, 606 aa, Helicobacter pylori
  misc_feature (B) LOCATION 1...606
  hypothetical: YES
MNYETIAESNESTVVAEFHSDSERKSAYESEAQLEREFIALLQKQGYEFKKIHNEKELKDNLKEQLEKLNDHCFTPKEWDTLYFQFIANKNEDYKAKTRKIQEDPIFNLALENGKTKNIKIIDKKNIHRNALQVIHQYSNKGGKYENRYDVSVLVNGLPLVHVELKKRGVAIREAFNQIKRYKRDSFSAEDGLFEFVQIFVISNGTSSKYYSNTTRIAQIEKNNKADTFEFTNYWADSKNRNIEDLMDFAKSFFAKRSLLNVLTRYCVFTSEEVLLVMRPYQIVAAERILEKIKATHDSKTYGKSQSGGYIWHTTGSGKTLTSFKSATLAKELEHVSKVLFVVDRKDLDYQTMKEYDKFQKDCANSNTSTKILKQQLEDFNAKIIITTIQKLDKFVKAHLKGHAIFNEEVVMIFDECHRSQLGSMHQAITKAFKKYHLFGFTGTPIFAQNCDKNNPLGTTEQKFGRCLHQYTIIDAIRDKNVLPFRVEYHNTIKAKEGIKDKEGIKDKEVRAVDEKNALLDSRRIKEIAKCILERFHQATKNKKFNSILACSGIEALKKYYQAFKEEKHDLKIATIFSYSANEEIEALEDENNESTAGLDKSSRDF

SEQ ID NO: 7453 - protein, 969 aa, Helicobacter pylori
  misc_feature (B) LOCATION 1...969
  hypothetical: YES
MNYETIAESNESTVVAEFHSDSERKSAYESEAQLEREFIALLQKQGYEFKKIHNEKELKDNLKEQLEKLNDHCFTPKEWDTLYFQFIANKNEDYKAKTRKIQEDPIFNLALENGKTKNIKIIDKKNIHRNALQVIHQYSNKGGKYENRYDVSVLVNGLPLVHVELKKRGVAIREAFNQIKRYKRDSFSAEDGLFEFVQIFVISNGTSSKYYSNTTRIAQIEKNNKADTFEFTNYWADSKNRNIEDLMDFAKSFFAKRSLLNVLTRYCVFTSEEVLLVMRPYQIVAAERILEKIKATHDSKTYGKSQSGGYIWHTTGSGKTLTSFKSATLAKELEHVSKVLFVVDRKDLDYQTMKEYDKFQKDCANSNTSTKILKQQLEDFNAKIIITTIQKLDKFVKAHLKGHAIFNEEVVMIFDECHRSQLGSMHQAITKAFKKYHLFGFTGTPIFAQNCDKNNPLGTTEQKFGRCLHQYTIIDAIRDKNVLPFRVEYHNTIKAKEGIKDKEGIKDKEVRAVDEKNALLDSRRIKEIAKCILERFHQATKNKKFNSILACSGIEALKKYYQAFKEEKHDLKIATIFSYSANEEIEALEDENNESTAGLDKSSRDFLEGAIADYNGMFQISFDTSDQKFQSYYKDLSQKMKEREIDLLLVANMFLTGFDATRLNTLWVDKNLKYHGLIQAFSRTNRILDSVKTHGNIVCFRDLEQDLNDALMLFGNKDARSIALLRKYEDYLKGYADNNKEYEGYEGLIERLLTEFPLKEPIISESQKKDFIKLFGKILKLENILNSFENFNKDDHINPRDFQDYQSKYLDFYDEMRPEKGRDKEEINDDLIFEIELIKQVEVNIDYILTLIEKYAKEPDLEIQGVKTQIEPILNSSIELRNKKDLIMGFIDKYNKDEEVHAYFQNYIHQKREEEFQNIIEENRLNEEKAYSFMQHAFSGGEINFSGTEFPEIIEEKVSRFDKIRAIKR

SEQ ID NO: 7454 - protein, 146 aa, Helicobacter pylori
  misc_feature (B) LOCATION 1...146
  hypothetical: YES
GSGPLLSQLSKVLGDKNVLKGYFGQEINLTTYNLCRINMFLHDINYSKFHIALGDTLLDPKHEDDEPFDAIVSNPPYSTKWIGDNNPLLMNDERFNKAGALAPKTPPISPSPCTCFLIYPIKALLRSWNFPGCFIEAVPKRKSESI

SEQ ID NO: 7455 - protein, 145 aa, Helicobacter pylori
  misc_feature (B) LOCATION 1...145
  hypothetical: YES
SGPLLSQLSKVLGDKNVLKGYFGQEINLTTYNLCRINMFLHDINYSKFHIALGDTLLDPKHEDDEPFDAIVSNPPYSTKWIGDNNPLLMNDERFNKAGALAPKTPPISPSPCTCFLIYPIKALLRSWNFPGCFIEAVPKRKSESI

SEQ ID NO: 7456 - protein, 190 aa, Helicobacter pylori
  misc_feature (B) LOCATION 1...190
  hypothetical: YES
GRCASAKNAADLAFTMHMLSYLSNQGAAAIVEFPGVLYRSGAEKKIREYLVKENFIDCVIALPENLFFGTNIATCILVLKKNKKDDTTLFIDASKEFLKEGKKNKLKAHNREKILQTYIERKAIKHFSALANIEKIQENDYNLSVNRYVEQEDTKEIIDIKALNGEISQIVKKQSVLRNSLESIIKELEI

SEQ ID NO: 7457 - protein, 194 aa, Helicobacter pylori
  misc_feature (B) LOCATION 1...194
  hypothetical: YES
KNNILCYNETFKGRAKTAKQNRQSKHKKGAYLMENTNKASAKLNNHASLARNELHNTIWKVANELRGSVDGWDFKQYVLGILFYRYISENMANHHNEYERKIDPNFDYASLSDEEAEIVRKSTIEEKGFFIPPSALFCNVLKNAPNNEDLNVTLQNIFNEIEKSSLGTPSGGNVKGLFADLEVNSQQVRELSSK

SEQ ID NO: 7458 - protein, 528 aa, Helicobacter pylori
  misc_feature (B) LOCATION 1...528
  hypothetical: YES
MENTNKASAKLNNHASLARNELHNTIWKVANELRGSVDGWDFKQYVLGILFYRYISENMANHHNEYERKIDPNFDYASLSDEEAEIVRKSTIEEKGFFIPPSALFCNVLKNAPNNEDLNVTLQNIFNEIEKSSLGTPSEENVKGLFADLDVNSNKLGSSHQNRVEKLTKILQAIGGMQLGDYQQSGIDVFGDAYEYLMAMYASNAGKSGGEYFTPQEVSELLAKITLHNQENINKVYDPCCGSGSLLLQFSKVLGDKNVLKGYFGQEINLTTYNLCRINMFLHDINYSKFHIALGDTLLDPKHEDDEPFDAIVSNPPYSTKWIGDNNPLLMNDERFNKAGALAPKNAADLAFTMHMLSYLSNQGAAAIVEFPGVLYRSGAEKKIREYLVKENFIDCVIALPENLFFGTNIATCILVLKKNKKDDTTLFIDASKEFLKEGKKNKLKAHNREKILQTYIERKAIKHFSALANIEKIQENDYNLSVNRYVEQEDTKEIIDIKALNGEISQIVKKQSVLRNSLESIIKELEI

SEQ ID NO: 7459 - protein, 87 aa, Helicobacter pylori
  misc_feature (B) LOCATION 1...87
  hypothetical: YES
GRHPLYAKRIDELRCVGQKTANVVLSVCFDANYIAVDTHVFRTTHRLGLSNANTPIKTEEELSDLFKDNLSKLHHALILFGRYTWQS

SEQ ID NO: 7460 - protein, 116 aa, Helicobacter pylori
  misc_feature (B) LOCATION 1...116
  hypothetical: YES
SAIPYHQRKRARMSLKRAKTKAQQIKELLLKHYPNQTTELRHKNPYELLVATILSAQCTDARVNQITPKLFEKYPSVNDLALASLEEVKEIIQSVSYSNNKSKHLISMGAKSGVRF

SEQ ID NO: 7461 - protein, 214 aa, Helicobacter pylori
  misc_feature (B) LOCATION 1...214
  hypothetical: YES
MSLKRAKTKAQQIKELLLKHYPNQTTELRHKNPYELLVATILSAQCTDARVNQITPKLFEKYPSVNDLALASLEEVKEIIQSVSYSNNKSKHLISMGAKVVKDFKGVIPSTQKELMSLDGVGQKTANVVLSVCFDANYIAVDTHVFRTTHRLGLSNANTPIKTEEELSDLFKDNLSKLHHALILFGRYTCKAKNPLCDACFLKEFCVSKASFKA

SEQ ID NO: 7462 - protein, 94 aa, Helicobacter pylori
  misc_feature (B) LOCATION 1...94
  hypothetical: YES
VSNPKSSDTAEEKQKSSSVFSDKTIVLTGTLSKPRQEYAQMLENLGAKIASSVSAKTDFLIAGENAGSKLALAQKHGVSVLNEEELLKRLKELD

SEQ ID NO: 7463 - protein, 133 aa, Helicobacter pylori
  misc_feature (B) LOCATION 1...133
  hypothetical: YES
VLEKSEPEFLEMERFGVEMAHSLVNFYASNQEFIRSLFELLNPKSSDTAEEKQKSSSVFSDKTIVLTGTLSKPRQEYAQMLENLGAKIASSVSAKTDFLIAGENAGSKLALAQKHGVSVLNEEELLKRLKELD

SEQ ID NO: 7464 - protein, 491 aa, Helicobacter pylori
  misc_feature (B) LOCATION 1...491
  hypothetical: YES
KVFNDKKPKEYLERIEYLNTLSHHYYNLDEPIVSDAVYDELYQELKAYEEENPNRIQANSPTQKVGATATNEFSKNPHLMRMWSLDDVFNQNELRAWLQRILKVYPNASFVCSPKLDGVSLNLLYQHGKLISATTRGNGLEGELVTNNAKHIANIPHSIAYNGEIEIRGEVIISKEDFDALNKERLNANEPLFANPRNAASGSLRQLDSNITKKRKLQFIPWGVGKHSLHFLRFKECLDFIVSLGFSAIQYLSLNKNHQEIEENYHTLIREREGFFALLDGMVIVVDELDIQKELGYTQKSPKFACAYKFPALEKHTKIVGVINQVGRSGAITPVALLEPVEIAGAMVNRATLHNYSEIEKKNIMLNDRVVVIRSGDVIPKIIKPLESYRDGSQQKIMRPKVCPICSHELLCEEIFTYCQNLNCPARLKESLIHFASKDALNIQGLGDKVIEQLFEEKLIFNALDLYALKLEDLMRLDKFKIKKGENVLDA

SEQ ID NO: 7465 - protein, 490 aa, Helicobacter pylori
  misc_feature (B) LOCATION 1...490
  hypothetical: YES
KVFNDKKPKEYLERIEYLNTLSHHYYNLDEPIVSDAVYDELYQELKAYEEENPNRIQANSPTQKVGATATNEFSKNPHLMRMWSLDDVFNQNELRAWLQRILKVYPNASFVCSPKLDGVSLNLLYQHGKLISATTRGNGLEGELVTNNAKHIANIPHSIAYNGEIEIRGEVIISKEDFDALNKERLNANEPLFANPRNAASGSLRQLDSNITKKRKLQFIPWGVGKHSLHFLRFKECLDFIVSLGFSAIQYLSLNKNHQEIEENYHTLIREREGFFALLDGMVIVVDELDIQKELGYTQKSPKFACAYKFPALEKHTKIVGVINQVGRSGAITPVALLEPVEIAGAMVNRATLHNYSEIEKKNIMLNDRVVVIRSGDVIPKIIKPLESYRDGSQQKIMRPKVCPICSHELLCEEIFTYCQNLNCPARLKESLIHFASKDALNIQGLGDKVIEQLFEEKLIFNALDLYALKLEDLMRLDKFKIKKGENVLD

SEQ ID NO: 7466 - protein, 656 aa, Helicobacter pylori
  misc_feature (B) LOCATION 1...656
  hypothetical: YES
MIKSQKEYLERIEYLNTLSHHYYNLDEPIVSDAVYDELYQELKAYEEENPNRIQANSPTQKVGATATNEFSKNPHLMRMWSLDDVFNQNELRAWLQRILKVYPNASFVCSPKLDGVSLNLLYQHGKLISATTRGNGLEGELVTNNAKHIANIPHSIAYNGEIEIRGEVIISKEDFDALNKERLNANEPLFANPRNAASGSLRQLDSNITKKRKLQFIPWGVGKHSLHFLRFKECLDFIVSLGFSAIQYLSLNKNHQEIEENYHTLIREREGFFALLDGMVIVVDELDIQKELGYTQKSPKFACAYKFPALEKHTKIVGVINQVGRSGAITPVALLEPVEIAGAMVNRATLHNYSEIEKKNIMLNDRVVVIRSGDVIPKIIKPLESYRDGSQQKIMRPKVCPICSHELLCEEIFTYCQNLNCPARLKESLIHFASKDALNIQGLGDKVIEQLFEEKLIFNALDLYALKLEDLMRLDKFKIKKAQNLLDAIQKSKNPPLWRLINALGIEHIGKGASKTLAKYGLNVLEKSEAEFLEMEGFGVEMAHSLVNFYASNQEFIRSLFELLNPKSSDTAEEKQKSSSVFSDKTIVLTGTLSKPRQEYAQMLENLGAKIASSVSAKTDFLIAGENAGSKLALAQKHGVSVLNEEELLKRLKELD

SEQ ID NO: 7467 - protein, 218 aa, Helicobacter pylori
  misc_feature (B) LOCATION 1...218
  hypothetical: YES
VLDSFEILKALKSLDLLKNAPAWWWPNALKFEALLGAVLTQNTKFEAVLKSLENLKNAFILENDDEINLKKIAYIEFSKLAECVRPSGFYNQKAKRLIDLSKNILKDFQSFENFKQEVTKEWLLDQKGIGKESADAILCYVCAKEVMVVDKYSYLFLKKLGIEIEDYDELQHFFEKGVQENLNSALALYENTISLAQLYARFHGKIVEFSKQKLELKL

SEQ ID NO: 7468 - protein, 231 aa, Helicobacter pylori
  misc_feature (B) LOCATION 1...231
  hypothetical: YES
NTLFYFFLLQAVIVLDSFEILKALKSLDLLKNAPAWWWPNALKFEALLGAVLTQNTKFEAVLKSLENLKNAFILENDDEINLKKIAYIEFSKLAECVRPSGFYNQKAKRLIDLSKNILKDFQSFENFKQEVTKEWLLDQKGIGKESADAILCYVCAKEVMVVDKYSYLFLKKLGIEIEDYDELQHFFEKGVQENLNSALALYENTISLAQLYARFHGKIVEFSKQKLELKL

SEQ ID NO: 7469 - protein, 225 aa, Helicobacter pylori
  misc_feature (B) LOCATION 1...225
  hypothetical: YES
MIEVLMIEDDIELAEFLSEFLLQHGIHVINYDEPYTGISAANTQNYDLLLLDLTLPNLDGLEVCRRISKQKHIPIIISSARSDVEDKIKALDYGADDYLPKPYDPKELLARIQSLLRRSHKKEEVSEPGDANIFRVDKDSREVYMHEKKLDLTRAEYEILSLLISKKGYVFSRESIAIESESINPESSNKSIDVIIGRLRSKIEKNPKQPQYIISVRGIGYKLEY

SEQ ID NO: 7470 - protein, 226 aa, Helicobacter pylori
  misc_feature (B) LOCATION 1...226
  hypothetical: YES
SMIEVLMIEDDIELAEFLSEFLLQHGIHVINYDEPYTGISAANTQNYDLLLLDLTLPNLDGLEVCRRISKQKHIPIIISSARSDVEDKIKALDYGADDYLPKPYDPKELLARIQSLLRRSHKKEEVSEPGDANIFRVDKDSREVYMHEKKLDLTRAEYEILSLLISKKGYVFSRESIAIESESINPESSNKSIDVIIGRLRSKIEKNPKQPQYIISVRGIGYKLEY

SEQ ID NO: 7471 - protein, 169 aa, Helicobacter pylori
  misc_feature (B) LOCATION 1...169
  hypothetical: YES
GDLMAIDEDKQKAISLAIKQIDKVFGKGALVRLGDKQVEKIDAISTGSLGLDLALGIGGVPKGRIIEIYGPESSGKTTLSLHIIAECQKNGGVCAFIDAEHALDVYYAKRLGVDTENLLVSQPSTGEEALEILETITRSGGIDLVVVDSVEALTPKAEIDGDMGDQHVG

SEQ ID NO: 7472 - protein, 343 aa, Helicobacter pylori
  misc_feature (B) LOCATION 1...343
  hypothetical: YES
MAIDEDKQKAISLAIKQIDKVFGKGALVRLGDKQVEKIDAISTGSLGLDLALGIGGVPKGRIIEIYGPESSGKTTLSLHIIAECQKNGGVCAFIDAEHALDVYYAKRLGVDTENLLVSQPSTGEEALEILETITRSGGIDLVVVDSVAALTPKAEIDGDMGDQHVGLQARLMSHALRKITGVLHKMNTTLIFINQIRMKIGMTGYGSPKTTTGGNALKFYASVRIDIRRIAALKQNEQHIGNRAKAKVVKNKVAPPFREAEFDIMFGEGISKEGEIIDYGVKLDIVDKSGAWLSYQDKKLGQGRENAKALLKEDKALADEITLKIKESIGSNEEIMPLPSEPL

SEQ ID NO: 7473 - protein, 347 aa, Helicobacter pylori
  misc_feature (B) LOCATION 1...347
  hypothetical: YES
MAIDEDKQKAISLAIKQIDKVFGKGALVRLGDKQVEKIDAISTGSLGLDLALGIGGVPKGRIIEIYGPESSGKTTLSLHIIAECQKNGGVCAFIDAEHALDVYYAKRLGVDTENLLVSQPSTGEEALEILETITRSGGIDLVVVDSVAALTPKAEIDGDMGDQHVGLQARLMSHALRKITGVLHKMNTTLIFINQIRMKIGMTGYGSPETTTGGNALKFYASVRIDIRRIAALKQNEQHIGNRAKAKVVKNKVAPPFREAEFDIMFGEGISKEGEIIDYGVKLDIVDKSGAWLSYQDKKLGQGRENAKALLKEDKALADEITLKIKESIGSNEEIMPLPDEPLEEME

SEQ ID NO: 7474 - protein, 267 aa, Helicobacter pylori
  misc_feature (B) LOCATION 1...267
  hypothetical: YES
AGPAPTPQRFSFTKQRLHQGRKKANSALESAFKVIEILEKHLEEIVDSKFSASLEEELDNIAQNKADYQQVLKDFYYPFMDKIEAGKKNIISQKVHEKTGQSCPKCGGELVKKNSRYGEFIACNNYPKCKYIKQTENANDEAKQELCEKCGGEMVQKFSRNGAFLACNNYPECKNTKSLKNTPNAKETIEGVKCPECGGDIALKRSKKGSFYGCNNYPKCNFLSNHKPINKRCEKCHYLMSERIYRKKKAHECIQCKERVFLEEDNG

SEQ ID NO: 7475 - protein, 302 aa, Helicobacter pylori
  misc_feature (B) LOCATION 1...302
  hypothetical: YES
PLTYFTLDALFEPHLEAQLISYKGNKLKAQELIDEKKAQEIKNELEKESYIISSIIKKSKKSPTPPPFMTSTLQQSASSLLGFSPTKTMSIAQKLYEGVATPQGVMGVITYMRTDSLNIAKEALEEARAKILKDYGKDYLPPKAKVYSSKNKNAQEAHEAIRPTSIILEPNALKDYLKPEELKLYTLIYKRFLASQMQDALFESQSVVVACEKGEFKASGRKLLFDGHYKILGNDDKDKLLPNLKENDPIKLEKLESNAHVTEPPARYSEASLIKVLESLGIGRPSTYAPTILFYKTETTSR

SEQ ID NO: 7476 - protein, 541 aa, Helicobacter pylori
  misc_feature (B) LOCATION 1...541
  hypothetical: YES
LFEPHLEAQLISYKGNKLKAQELIDEKKAQEIKNELEKESYIISSIIKKSKKSPTPPPFMTSTLQQSASSLLGFSPTKTMSIAQKLYEGVATPQGVMGVITYMRTDSLNIAKEALEEARAKILKDYGKDYLPPKAKVYSSKNKNAQEAHEAIRPTSIILEPNALKDYLKPEELKLYTLIYKRFLASQMQDALFESQSVVVACEKGEFKASGRKLLFDGHYKILGNDDKDKLLPNLKENDPIKLEKLESNAHVTEPPARYSEASLIKVLESLGIGRPSTYAPTISLLQNRDYIKVEKKQISALESAFKVIEILEKHFEEIVDSKFSASLEEELDNIAQNKADYQQVLKDFYYPFMDKIEAGKKNIISQKVHEKTGQSCPKCGGELVKKNSRYGEFIACNNYPKCKYIKQTENANDEAKQELCEKCGGEMVQKFSRNGAFLACNNYPECKNTKSLKNTPNAKETIEGVKCPECGGDIALKRSKKGSFYGCNNYPKCNFLSNHKPINKRCEKCHYLMSERIYRKKKAHECIQCKERVFLEEDNG

SEQ ID NO: 7477 - protein, 256 aa, Helicobacter pylori
  misc_feature (B) LOCATION 1...256
  hypothetical: YES
MKVIKTAPLIPSEIKVLEKEGNRVKISLAPFEFGYAVTLAHPIRRLLLLSSVGYAPVGLKIEGVHHEFDSLRGVTEDVSLFIMNLKNIRFIAKALVGQDSSLENQSVVVDYSFKGPMELRARDLNSDHIEIVNPEMPLATINEDAQLNFSLIIYKGMGYVPSENTRELMPEGYMPLDGSFTPIKNVVYEIENVLVEGDPNYEKIIFDIETDGQIDPYKAFLSAVKVMSKQLGVFGERPIANTEYSGDYAQEMTLKT

SEQ ID NO: 7478 - protein, 345 aa, Helicobacter pylori
  misc_feature (B) LOCATION 1...345
  hypothetical: YES
SMKVIKTAPLIPSEIKVLEKEGNRVKISLAPFEFGYAVTLAHPIRRLLLLSSVGYAPVGLKIEGVHHEFDSLRGVTEDVSLFIMNLKNIRFIAKALVGQDSSLENQSVVVDYSFKGPMELRARDLNSDHIEIVNPEMPLATINEDAQLNFSLIIYKGMGYVPSENTRELMPEGYMPLDGSFTPIKNVVYEIENVLVEGDPNYEKIIFDIETDGQIDPYKAFLSAVKVMSKQLGVFGERPIANTEYSGDYAQWYDAKDLSAKIESMNLSVSCFNCLDKIGIKYVGELVLMSEEELKGVKNMGKKSYDEIAEKLNDLGYPVGTELSPEQRESLKKRLEKLEDKGGND

SEQ ID NO: 7479 - protein, 643 aa, Helicobacter pylori
  misc_feature (B) LOCATION 1...643
  hypothetical: YES
NLLETLQLNPEQLKAASALQGHNLIIASAGTGKTSTIVGRILHLLNNGIKPEEILLLTFTNKASNEMIARVAKYSKLSSKIEAGTFHAVAYRYLKEHYPNLSLKQPKELRKLLESIVDTKNALTDEDKKPYTSQHLYALYSLYTNALKQEDFSAWLSSKNPEHAPYAAFYENILEEFENTKKKHDYIDYNDLLLLFKKAMLERSSPYKEVLCDEFQDTNPLQESILDAINPPSLFCVGDYDQSIYAFNGADISIISNFTQKYKNARVFTLTKNYRSSKEILDLANQVIQHNQRIYPKNLEVVKSGKFNKPTLLNYNDNIAQCQDIAKRIVMRKNFKEVAVIFRNNASADQLEAALRSHNVPSKRKGSASFFESKEVALALDICALLFNPKDIMAAIHILSYISDIGSNTAKDIHEALMLLGNGDLKSALIQPNQEAKIYTKKKEITSMGLFEEIFALENSSRFNSVIDKAFHSHPVLMHPKISLNGAKMLSDFFILYTKAPIHSPSALIKHILESAFFQTFKTRLLKERSKNRDESYNEFKKLQAQKRFNEKMDLLSSLAKNYQNLGRFLNGTLIGSSEATQGEGVNLLSVHASKGLEFKDVYIIDLMEGRFPNHKLMNTGGGIEEERRLFYVAINSASFPVG

SEQ ID NO: 7480 - protein, 676 aa, Helicobacter pylori
  misc_feature (B) LOCATION 1...676
  hypothetical: YES
LLETLQLNPEQLKAASALQGHNLIIASAGTGKTSTIVGRILHLLNNGIKPEEILLLTFTNKASNEMIARVAKYSKLSSKIEAGTFHAVAYRYLKEHYPNLSLKQPKELRKLLESIVDTKNALTDEDKKPYTSQHLYALYSLYTNALKQEDFSAWLSSKNPEHAPYAAFYENILEEFENTKKKHDYIDYNDLLLLFKKAMLERSSPYKEVLCDEFQDTNPLQESILDAINPPSLFCVGDYDQSIYAFNGADISIISNFTQKYKNARVFTLTKNYRSSKEILDLANQVIQHNQRIYPKNLEVVKSGKFNKPTLLNYNDNIAQCQDIAKRIVMRKNFKEVAVIFRNNASADQLEAALRSHNVPSKRKGSASFFESKEVALALDICALLFNPKDIMAAIHILSYISDIGSNTAKDIHEALMLLGNGDLKSALIQPNQEAKIYTKKKEITSMGLFEEIFALENSSRFNSVIDKAFHSHPVLMHPKISLNGAKMLSDFFILYTKAPIHSPSALIKHILESAFFQTFKTRLLKERSKNKDGSYNEFKKLQAQKRFNEKMDLLSSLAKNYQNLGRFLNGTLIGSSEATQGEGVNLLSVHASKGLEFKDVYIIDLMEGRFPNHKLMNTGGGIEEERRLFYVAITRAKENLWLSYAKNELRENAKPKEHKPSVFLYEAGLLKLDSK

SEQ ID NO: 7481 - protein, 381 aa, Helicobacter pylori
  misc_feature (B) LOCATION 1...381
  hypothetical: YES
LENFLYQLEIKTLGQVFTPKNIVDFMLILKHNHGSVLEPSAGDGSFLKRLKKAVGIEIDPKICPKNALCMDFFDYPLENQFNTIIGNPPYVKHKDIAPSTKEKLHYSLFDERSNLYLFFIEKAIKHLKPKGELIFITPRDFLKSTSSVKLNEWIYKEGTITHFFELGDQKIFPNAMPNCVIFRFCKGDFSRITNDGLQFVCKKGILYFLNQSYTQKLSEVFKVKVGAVSGCDKIFKNETYGNLEFVTSITKRTNVLEKMVFVNKPNDYLLQHKDSLMQRKIKKFNENNWFEWGRMHHISPKKRIYVNAKTHQKNPFFIHQCPNYDGSILALFPYNQNLDLQNLCDKLNAINWQELGFVCDGRFLFSQRSLENALLPKDFLN

SEQ ID NO: 7482 - protein, 384 aa, Helicobacter pylori
  misc_feature (B) LOCATION 1...384
  hypothetical: YES
EIFLENFLYQLEIKTLGQVFTPKNIVDFMLILKHNHGSVLEPSAGDGSFLKRLKKAVGIEIDPKICPKNALCMDFFDYPLENQFNTIIGNPPYVKHKDIAPSTKEKLHYSLFDERSNLYLFFIEKAIKHLKPKGELIFITPRDFLKSTSSVKLNEWIYKEGTITHFFELGDQKIFPNAMPNCVIFRFCKGDFSRITNDGLQFVCKKGILYFLNQSYTQKLSEVFKVKVGAVSGCDKIFKNETYGNLEFVTSITKRTNVLEKMVFVNKPNDYLLQHKDSLMQRKIKKFNENNWFEWGRMHHISPKKRIYVNAKTHQKNPFFIHQCPNYDGSILALFPYNQNLDLQNLCDKLNAINWQELGFVCDGRFLFSQRSLENALLPKDFLN

SEQ ID NO: 7483 - protein, 431 aa, Helicobacter pylori
  misc_feature (B) LOCATION 1...431
  hypothetical: YES
MQKIIEDSLELAKKLQDSISNHLSEQEKAFHFKMQKLLNNPENKVMLIELMDRSFRCLDNKARFEMIEHVLDKYKSREIFSSFEKWLLMGFLSFGKMLPDMSVPFFVNKIRSDTKAMVLDQEESQLRERILKRKNEKIILNVNFIGEEVLGEEEASARFEKYSQALKSNYIQYISIKITTIFSQINILDFEYSKKEIVKRLDALYALALEEEKKQGMPKFINLDMEEFRDLELTVESFMESIAKFDLNAGIVLQAYIPDSYEYLKKLHAFSKERVLKGLKPIKIRFVKGANMESEETIASMKDWALPTFSSKQDTDSNYNKMLDFVLEGDNYKYIHIGAASHNIFEIAYVYTRIHALNDPVVLEHFSFEMLEGMSLQASQELKEMHKLILYAPVCDEAHFNNAIAYLVRRLDENTSSDNFMKAFFNLKVGT

SEQ ID NO: 7484 - protein, 434 aa, Helicobacter pylori
  misc_feature (B) LOCATION 1...434
  hypothetical: YES
IKGKLMQKIIEDSLELAKKLQDSISNHLSEQEKAFHFKMQKLLNNPENKVMLIELMDRSFRCLDNKARFEMIEHVLDKYKSREIFSSFEKWLLMGFLSFGKMLPDMSVPFFVNKIRSDTKAMVLDQEESQLRERILKRKNEKIILNVNFIGEEVLGEEEASARFEKYSQALKSNYIQYISIKITTIFSQINILDFEYSKKEIVKRLDALYALALEEEKKQGMPKFINLDMEEFRDLELTVESFMESIAKFDLNAGIVLQAYIPDSYEYLKKLHAFSKERVLKGLKPIKIRFVKGANMESEETIASMKDWALPTFSSKQDTDSNYNKMLDFVLEGDNYKYIHIGAASHNIFEIAYVYTRIHALNDPVVLEHFSFEMLEGMSLQASQELKEMHKLILYAPVCDEAHFNNAIAYLVRRLDENTSSDNFMKAFFNLKV

SEQ ID NO: 7485 - protein, 72 aa, Helicobacter pylori
  misc_feature (B) LOCATION 1...72
  hypothetical: YES
DLRTYPTEKLLEIANKLKVENPQEFKRQDLMFEILKTQVTQGGYILFTGILEIMPFGDGFLRGFDGSFSDRA

SEQ ID NO: 7486 - protein, 71 aa, Helicobacter pylori
  misc_feature (B) LOCATION 1...71
  hypothetical: YES
LRTYPTEKLLEIANKLKVENPQEFKRQDLMFEILKTQVTQGGYILFTGILEIMPFGDGFLRGFDGSFSDRA

SEQ ID NO: 7487 - protein, 134 aa, Helicobacter pylori
  misc_feature (B) LOCATION 1...134
  hypothetical: YES
VGAWMQTPCTGPSAFLEPQGNIEEGGSLTIIATALIETGSRMDEVIFEEFKGTGNSEIVLARNIADRRIYPAFDILKSGTRKDNILLGKDRLTKVWVLRNVMQQMDDIEALSFVYSKMQQTKDNEEFLNLMNEK

SEQ ID NO: 7488 - protein, 214 aa, Helicobacter pylori
  misc_feature (B) LOCATION 1...214
  hypothetical: YES
GMGDIVTGPKVRSPKDQEKYYALLKIEAINYLPSDEIKNRPLFDNLTPLFPDEQIKLEYEPTKVTGRMLDLFSPVGKGQRALIVAPPRTGKTELMKELAQGITSNHPEVELIILLVDERPEEVTDMQRSVKGQVFSSTFDLPANNHIRIAELVLERAKRRVEMGKDVVVLLDSITRLARAYNAVTPSSGKVLSGGVDANALHRPKRFFGAAREY

SEQ ID NO: 7489 - protein, 438 aa, Helicobacter pylori
  misc_feature (B) LOCATION 1...438
  hypothetical: YES
MNENAPTHKSSHKVKTHTPVSGYHIEDLRTYPTEKLLEIANKLKVENPQEFKRQDLMFEILKTQVTQGGYILFTGILEIMPDGYGFLRGFDGSFSDGHNDTYVSPSQIRRFALRNGDIVTGQVRSPKDQEKYYALLKIEAINYLPSDEIKNRPLFDNLTPLFPDEQIKLEYEPTKVTGRMLDLFSPVGKGQRALIVAPPRTGKTELMKELAQGITSNHPEVELIILLVDERPEEVTDMQRSVKGQVFSSTFDLPANNHIRIAELVLERAKRRVEMGKDVVVLLDSITRLARAYNAVTPSSGKVLSGGVDANALHRPKRFFGAARNIEEGGSLTIIATALIETGSRMDEVIFEEFKGTGNSEIVLARNIADRRIYPAFDILKSGTRKDNILLGKDRLTKVWVLRNVMQQMDDIEALSFVYSKMQQTKDNEEFLNLMNEK

SEQ ID NO: 7490 - protein, 55 aa, Helicobacter pylori
  misc_feature (B) LOCATION 1...55
  hypothetical: YES
KEDVREIPPMEMLASSSCSLAIVLENDVKKEFLRQIKESALKPQGKRPLVFDHQR

SEQ ID NO: 7491 - protein, 58 aa, Helicobacter pylori
  misc_feature (B) LOCATION 1...58
  hypothetical: YES
VKKEFLRQIKESALKHQGKRPLYLIIKDKDKQFKIQSDLMVNEKIKDDFKGLEWRDLA

SEQ ID NO: 7492 - protein, 71 aa, Helicobacter pylori
  misc_feature (B) LOCATION 1...71
  hypothetical: YES
IATQACMPQRLVVDSQKELWHKTPLFASEKTGGIVTQYSMKYLEPVDLIKFDFLGLKTLTMIDDAFKFIKT

SEQ ID NO: 7493 - protein, 77 aa, Helicobacter pylori
  misc_feature (B) LOCATION 1...77
  hypothetical: YES
MLTSESNKIESAARYIDEVRALEIEVMPPHINSSMQDFSVAEFKNQKGELEKKIVFGLGAVKGVGGEPIKNIIEERG

SEQ ID NO: 7494 - protein, 101 aa, Helicobacter pylori
  misc_feature (B) LOCATION 1...101
  hypothetical: YES
AMLTSESNKIESAARYIDEVRALEIEVMPPHINSSMQDFSVAEFKNQKGELEKKIVFGLGAVKGVGGEPIKNIIEERAKGDYKRWKISFHGWIFLNSLKNL

SEQ ID NO: 7495 - protein, 100 aa, Helicobacter pylori
  misc_feature (B) LOCATION 1...100
  hypothetical: YES
MLTSESNKIESAARYIDEVRALEIEVMPPHINSSMQDFSVAEFKNQKGELEKKIVFGLGAVKGVGGEPIKNIIEERAKGDYKRWKISFHGWIFLNSLKNL

SEQ ID NO: 7496 - protein, 156 aa, Helicobacter pylori
  misc_feature (B) LOCATION 1...156
  hypothetical: YES
KKRALNLSSAWKRISITMTPSLAKKPDNAFHLCLFAKTQEGYENLMFLSSMAYLEGFYYFPRINKKLLREHSKGIIASSACLQGEVNYHLNTNNERNRKYGVKGYDEAKRIACEYQEIFEDDFYLEIMRHGILDQRFIDEQVIKMSLETGLKIIAT

SEQ ID NO: 7497 - protein, 213 aa, Helicobacter pylori
  misc_feature (B) LOCATION 1...213
  hypothetical: YES
FFPPPQPKREGGGEVVRPTNPQKNERAEAARGEDRPTAPNKDTEGPLALYPEQIEKKIEVITNMKFPGYMLIVWDFIRYAKEMGIPVGPGRGSAAGSLVAFALKITDIDPLKYDLLFERFLNPERVSMPDIDTDFCQRRRKEIIEYMVEKYGKYNVAQVITFNKMLAKGVIRDVARVLDMPYKEADDFAKLIPNRLGITLKGYEKNGEFIEGA

SEQ ID NO: 7498 - protein, 255 aa, Helicobacter pylori
  misc_feature (B) LOCATION 1...255
  hypothetical: YES
VEDFISRVDFSKLTKKSLEPLVKSGSLDNLGYTRKTMLANLDLICDAGRAKDKANEMMQGGNSLFGAMEGGIKEQVVLDMVDLGEHDAKTLLECEYETLGIHVSGNPLDEFKEEIKGFKNLVKSIDIEELEIGSQAYLLGKIMEVKKKIGKRSGKPYGTADILDRYGKFELMLFEKQLNALEELDINKPLVFKCKIEEQEEVARLRLFEILDLESAREVKIPKARYKDLKSKKKTCAKSPPWKCSLLALALWRSC

SEQ ID NO: 7499 - protein, 604 aa, Helicobacter pylori
  misc_feature (B) LOCATION 1...604
  hypothetical: YES
MKENKAFTHLHLHTEYSLLDGANKIKILAKRIKELGMKSVSVTDHGNMFGAIDFYTSMKKEGIKPIIGMEAYIHNDDNLSSKETKQRFHLCLFAKNQEGYENLMFLSSMAYLEGFYYFPRINKKLLREHSKGIIASSACLQGEVNYHLNTNNERNRKYGAKGYDEAKRIACEYQEIFEDDFYLEIMRHGILDQRFIDEQVIKMSLETGLKIIATNDTHYTMPNDAKAQEVAMCVAMGKTLNDKGRLKHSVHEFYIKSPEEMAKLFADIPEALENTQEIADKCVLEIDLKDDKKNPPTPPSFKFTKAYAQNEGLSFEDDASYFAHKAREGLRERLILVPEEKHEQYKERLEKEIEVITNMKFPGYMLIVWDFIRYAKEMGIPVGPGRGSAAGSLVAFALKITDIDPLKYDLLFERFLNPERVSMPDIDTDFCQRRRKEIIEYMIEKYGKYNVAQVITFNKMLAKGVIRDVARVLDMPYKEADDFAKLIPNRLGITLKGYEKNGEFIEGAWELEPKIKELVESNEVAKQVWEYSLNLENLNRNAGVHAAALVVDSQKELWHKTPLFASEKTGGIVTQYSMKYLEPVDLIKFDFLGLKTLTVIDDAL

SEQ ID NO: 7500 - protein, 1211 aa, Helicobacter pylori
  misc_feature (B) LOCATION 1...1211
  hypothetical: YES
MKENKAFTHLHLHTEYSLLDGANKIKILAKRIKELGMKSVSVTDHGNMFGAIDFYTSMKKEGIKPIIGMEAYIHNDDNLSSKETKQRFHLCLFAKNQEGYENLMFLSSMAYLEGFYYFPRINKKLLREHSKGIIASSACLQGEVNYHLNTNNERNRKYGAKGYDEAKRIACEYQEIFEDDFYLEIMRHGILDQRFIDEQVIKMSLETGLKIIATNDTHYTMPNDAKAQEVAMCVAMGKTLNDKGRLKHSVHEFYIKSPEEMAKLFADIPEALENTQEIADKCVLEIDLKDDKKNPPTPPSFKFTKAYAQNEGLSFEDDASYFAHKAREGLRERLILVPEEKHEQYKERLEKEIEVITNMKFPGYMLIVWDFIRYAKEMGIPVGPGRGSAAGSLVAFALKITDIDPLKYDLLFERFLNPERVSMPDIDTDFCQRRRKEIIEYMIEKYGKYNVAQVITFNKMLAKGVIRDVARVLDMPYKEADDFAKLIPNRLGITLKGYEKNGEFIEGAWELEPKIKELVESNEVAKQVWEYSLNLENLNRNAGVHAAALVVDSQKELWHKTPLFASEKTGGIVTQYSMKYLEPVDLIKFDFLGLKTLTVIDDALKIIKTQHNIDVDFLSLDMDDPKVYKTIQSGDTVGIFQIESGMFQGLNKRLRPSSFEDIIAIIALGRPGPMESGMVDDFVNRKHGVEPIAYAFKELEPILKPTYGTIVYQEQVMQIVQTIGGFSLGEADLIRRAMGKKDAQIMADNKAKFVEGAKNLGHDGQKAANLWDLIVKFAGYGFNKSHSAAYAMITFQTAYLKTYYKHEFMAAMLTSESNKIESVARYIDEVRALEIEVMPPHINSSMQDFSVAEFKNQKGELEKKIVFGLGAVKGVGGEPIKNIIEERAKGDYKSLEDFISRVDFSKLTKKSLEPLVKSGSLDNLGYTRKTMLANLDLICDAGRAKDKANEMMQGGNSLFGAMEGGIKEQVVLDMVDLGEHDAKTLLECEYETLGIHVSGNPLDEFKEEIKGFKNLVKSIDIEELEIGSQAYLLGKIMEVKKKIGKRSGKPYGTADILDRYGKFELMLFEKQLNALEELDINKPLVFKCKIEEQEEVARLRLFEILDLESAREVKIPKARYKDPEKQKEDVREIPPMEMLASSSCSLAIVLENDVKKEFLRQIKESALKHQGKRPLYLIIKDKDKQFKIQSDLMVNEKIKDDFKGLEWRDLA

SEQ ID NO: 7501 - protein, 76 aa, Helicobacter pylori
  misc_feature (B) LOCATION 1...76
  hypothetical: YES
MLILSRKVNEGIVIDDNIHIKVISIDRGSVRLGFEAPESTLILRTELKEAIVSENQKASASVDESLLENIKKVIKP

SEQ ID NO: 7502 - protein, 86 aa, Helicobacter pylori
  misc_feature (B) LOCATION 1...86
  hypothetical: YES
PFSIRNKRSDMLILSRKVNEGIVIDDNIHIKVISIDRGSVRLGFEAPESTLILRTELKEAIVSENQKASASVDESLLENIKKVIKP

SEQ ID NO: 7503 - protein, 130 aa, Helicobacter pylori
  misc_feature (B) LOCATION 1...130
  hypothetical: YES
SKRMKQKLKAQIKERVASIAYNEKGFPSPFLFKDLKKAALKIIEAMRANTEILVVGDYDADGVISSAIMAKFFKSLNYKHVRVAIPNRFMDGYGISKKFLEKHHAPLIITVDNGINPFEAAQFCKEKTTP

SEQ ID NO: 7504 - protein, 399 aa, Helicobacter pylori
  misc_feature (B) LOCATION 1...399
  hypothetical: YES
SRSILQGKNYTLIIPITIAYTMMKSQTHAVINPKQPDCDFIQKEVCGALVAFYLCYGIHQLLGKEKSHSSELLCLAGVATIADMMPLTFFNRFLVSKALYFLQKESLGAMGFLRQREVFRKRSLKASDISFNIAPLINSAGRMQDAKMALDFLSANNFQDGCSLYERLKACNMKRKMIQQQVFEEAFRHAMVGEKIIVAFKDNWHEGVLGIVASKLVEATQKPSLVFTFKEGVYKGSARSSPNIDLIDALNGVSSLLLGYGGHRQACGLSVGKNNIVSLFETLENFDFKVLPFYETEPPLTLNLKDIDRELLEIIEMGEPYGQENPEPLFQAKNLEVIEEKIIKESHQVLRFKDKECVKEAIYFNADRFLKAGERVSVLFSVELDECSNEPKMFVKSLL

SEQ ID NO: 7505 - protein, 516 aa, Helicobacter pylori
  misc_feature (B) LOCATION 1...516
  hypothetical: YES
MKQKLKAQIKERVASIAYNEKGFPSPFLFKDLKKAALKIIEAMRANTEILVVGDYDADGVISSAIMAKFFKSLNYKHVRVAIPNRFMDGYGISKKFLEKHHAPLIITVDNGINAFEAAQFCKEKNYTLIITDHHCLHHDEIPDAYAVINPKQPDCDFIQKEVCGALVAFYLCYGIHQLLGKEKSHSSELLCLAGVATIADMMPLTFFNRFLVSKALYFLQKESLGAMGFLRQREVFRKRSLKASDISFNIAPLINSAGRMQDAKMALDFLSANNFQDGCSLYERLKACNMKRKMIQQQVFEEAFRHAMVGEKIIVAFKDNWHEGVLGIVASKLVEATQKPSLVFTFKEGVYKGSARSSPNIDLIDALNGVSSLLLGYGGHRQACGLSVGKNNIVSLFETLENFDFKVLPFYETEPPLTLNLKDIDRELLEIIEMGEPYGQENPEPLFQAKNLEVIEEKIIKESHQVLRFKDKECVKEAIYFNADRFLKAGERVSVLFSVELDECSNEPKMFVKSLL

SEQ ID NO: 7506 - protein, 63 aa, Helicobacter pylori
  misc_feature (B) LOCATION 1...63
  hypothetical: YES
SKKFAHIKAKQLLGIEILPDIHILAVLNMIKMGDGSSQILNQDSLSGFDGKVNDKEFKANALF

SEQ ID NO: 7507 - protein, 66 aa, Helicobacter pylori
  misc_feature (B) LOCATION 1...66
  hypothetical: YES
IKRWVLTPPYVATLLARLSKVNKDSFVWDFATGSAGLLVASMNLMIEDAKKRITSPEELEQKIRPH

SEQ ID NO: 7508 - protein, 69 aa, Helicobacter pylori
  misc_feature (B) LOCATION 1...69
  hypothetical: YES
NENNNKAINGESRLKRCFSEIVDNLGVYYKIGLSTDFTGKLFNEMYRWLGFTQDKLNDGCSHPLMSPRF

SEQ ID NO: 7509 - protein, 199 aa, Helicobacter pylori
  misc_feature (B) LOCATION 1...199
  hypothetical: YES
RFVLNPPYSAPGNGMVFVEQALEKMQSGYASVIIQSSAGSGKAKEYNVRILEKHTLLASIKMPLDLFIGKSSVQTHIYVFRVNEKHDAKQRVKFINFSNDGYARANRKKAKASHNLKDTHNAKERYNEVVDLVHIGQSCLKFLSEDDYYENTIDPKNGSDWNQNKPTDTKPELEDFKRTIADYLSYEVGLILKNQTPPK

SEQ ID NO: 7510 - protein, 290 aa, Helicobacter pylori
  misc_feature (B) LOCATION 1...290
  hypothetical: YES
FYFLKRIPMNKVQSIEPLIADKFNNELRSYNLEYKLEQESLNTEIDEALKNYASKSWGLGGNRPDVKLLLNTQYPNRRIPVLIEYKGLKDKLVKLDKNKLVENFKNHESHYKNIREYALNGALHYANAILHHTDYTECIAIGITGYKDNKGDIRSQIAVYYVNKSNLGMGIDVSKGEQAYSDLSFLSRKHFNDFIKRVDTLSLSDEDLERIREKKNQEIEDCLMQLNNNIYDKEKNFLSEHNRVYLVIASIIANLGIPNLVAPLNKEDLKSSDENGERDGDKILRKSDPF

SEQ ID NO: 7511 - protein, 426 aa, Helicobacter pylori
  misc_feature (B) LOCATION 1...426
  hypothetical: YES
MNKVQSIEPLIADKFNNELRSYNLEYKLEQESLNTEIDEALKNYASKSWGLGGNRPDVKLLLNTQYPNRRIPVLIEYKGLKDKLVKLDKNKLVENFKNHESHYKNIREYALNGALHYANAILHHTDYTECIAIGITGYKDNKGDIRSQIAVYYVNKSNLGMGIDVSKGEQAYSDLSFLSRKHFNDFIKRVDTLSLSDEDLERIREKKNQEIEDCLMQLNNNIYDKEKNFLSEHNRVYLVIASIIANLGIPNLVAPLNKEDLKSSDENGERDGDKILRKIRSFLERKQLPLEKRESIISSLEPLLKNENNNKAINGESRLKRCFSEIVDNLGVYYKIGLSTDFTGKLFNEMYRWLGFTQDKLNDVVLTPPYVATLLARLSKVNKDSFVWDFATGSAGLLVASMNLMIEDAKKRITSPEELEQKIRPH

SEQ ID NO: 7512 - protein, 678 aa, Helicobacter pylori
  misc_feature (B) LOCATION 1...678
  hypothetical: YES
MNKVQSIEPLIADKFNNELRSYNLEYKLEQESLNTEIDEALKNYASKSWGLGGNRPDVKLLLNTQYPNRRIPVLIEYKGLKDKLVKLDKNKLVENFKNHESHYKNIREYALNGALHYANAILHHTDYTECIAIGITGYKDNKGDIRSQIAVYYVNKSNLGMGIDVSKGEQAYSDLSFLSRKHFNDFIKRVDTLSLSDEDLERIREKKNQEIEDCLMQLNNNIYDKEKNFLSEHNRVYLVIASIIANLGIPNLVAPLNKEDLKSSDENGERDGDKILRKIRSFLERKQLPLEKRESIISSLEPLLKNENNNKAINGESRLKRCFSEIVDNLGVYYKIGLSTDFTGKLFNEMYRWLGFTQDKLNDVVLTPPYVATLLARLSKVNKDSFVWDFATGSAGLLVASMNLMIEDAKKRITSPEELEQKIAHIKAKQLLGIEILPDIHILAVLNMILMGDGSSQILNQDSLSGFDGKVNDKEFKANAFVLNPPYSAPGNGMVFVEQALEKMQSGYASVIIQSSAGSGKAKEYNVRILEKHTLLASIKMPLDLFIGKSSVQTHIYVFRVNEKHDAKQRVKFINFSNDGYARANRKKAKASHNLKDTHNAKERYNEVVDLVHIGQSCLKFLSEDDYYENTIDPKNGSDWNQNKPTDTKPELEDFKRTIADYLSYEVGLILKNQTPPK

SEQ ID NO: 7513 - protein, 76 aa, Helicobacter pylori
  misc_feature (B) LOCATION 1...76
  hypothetical: YES
TSLSLFGEDLAKEKRSIAKSINFGLVYGMGSKKLSETLSIPLSEAKSYIEAYFKRFPSIKDYLNGMREEILKTSKA

SEQ ID NO: 7514 - protein, 75 aa, Helicobacter pylori
  misc_feature (B) LOCATION 1...75
  hypothetical: YES
TSLSLFGEDLAKEKRSIAKSINFGLVYGMGSKKLSETLSIPLSEAKSYIEAYFKRFPSIKDYLNGMREEILKTSK

SEQ ID NO: 7515 - protein, 721 aa, Helicobacter pylori
  misc_feature (B) LOCATION 1...721
  hypothetical: YES
MEQPVIKEGTLALIDTFAYLFRSYYMSAKNKPLTNDKGFPTGLLTGLVGMVKKFYKDRKNMPFIVFALESQTKTKRAEKLGEYKQNRKDAPKEMLLQIPIALEWLQKMGFTCVEVGGFEADDVIASLATLSPYKTRIYSKDKDFNQLLSDKIALFDGKTEFLAKDCVEKYGILPSQFTDYQGIVGDSSDNYKGVKGIGSKNAKELLQRLGSLEKIYENLDLAKNLLSPKMYQALIQDKGSAFLSKELATLERGCIKEFDFLSCAFPSENPLLKIKDELKEYGFISTLRDLENSPFIVENVPILNSTPILDNTPALDNAPKKSRMIVLESAEPLSMFLEKLENPNARVFMRLVLDKDKKILALAFLLQDQGYFLPLEEALFSPFSLEFLQNAFSQMLQHACIIGHDLKPLLSFLKAKYQVPLENIRIQDTQILAFLKNPEKVGFDEVLKEYLKEDLIPHEKIKDFKTKSKAEKSELLSMELNALKRLCEYFEKGGLEEDLLTLARDIETPFVKVLMGMEFQGFKIDAALENIVIAGVTNKPNGAGAITSTGHVTDYAVFNNIKAMLPILQQALTLSQSNHTLSTQLQARAMGSQTNREFAKDIYALAQNQKQILSNASSIFNLFNSIPKDQLKYLENAYLKVPHLGKTPTNPYRQNVNLNKEINAVQDNVANYGNRLDSALSVAKDVYNLKSNQTEIVTTYNDAKNLGPGVSKLPCRCLEKI

SEQ ID NO: 7516 - protein, 785 aa, Helicobacter pylori
  misc_feature (B) LOCATION 1...785
  hypothetical: YES
MEQPVIKEGTLALIDTFAYLFRSYYMSAKNKPLTNDKGFPTGLLTGLVGMVKKFYKDRKNMPFIVFALESQTKTKRAEKLGEYKQNRKDAPKEMLLQIPIALEWLQKMGFTCVEVGGFEADDVIASLATLSPYKTRIYSKDKDFNQLLSDKIALFDGKTEFLAKDCVEKYGILPSQFTDYQGIVGDSSDNYKGVKGIGSKNAKELLQRLGSLEKIYENLDLAKNLLSPKMYQALIQDKGSAFLSKELATLERGCIKEFDFLSCAFPSENPLLKIKDELKEYGFISTLRDLENSPFIVENVPILNSTPILDNTPALDNAPKKSRMIVLESAEPLSMFLEKLENPNARVFMRLVLDKDKKILALAFLLQDQGYFLPLEEALFSPFSLEFLQNAFSQMLQHACIIGHDLKPLLSFLKAKYQVPLENIRIQDTQILAFLKNPEKVGFDEVLKEYLKEDLIPHEKIKDFKTKSKAEKSELLSMELNALKRLCEYFEKGGLEEDLLTLARDIETPFVKVLMGMEFQGFKIDAPYFKRLEQEFKNELNVLERQILDLIGVDFNLNSPKQLGEVLYDKLGLPKNKSHSTDEKNLLKILDKHPSIPLILEYRELNKLFNTYTTPLLRLKDKDDKIHTTFIQTGTATGRLSSHSPNLQNIPVRSPKGLLIRKGFIASSKEYCLLGVDYSQIELRLLAHFSQDKDLMEAFLKGRDIHLETSKALFGEDLAKEKRSIAKSINFGLVYGMGSKKLSETLSIPLSEAKSYIEAYFKRFPSIKDYLNGMREEILKTSKAF

SEQ ID NO: 7517 - protein, 897 aa, Helicobacter pylori
  misc_feature (B) LOCATION 1...897
  hypothetical: YES
MEQPVIKEGTLALIDTFAYLFRSYYMSAKNKPLTNDKGFPTGLLTGLVGMVKKFYKDRKNMPFIVFALESQTKTKRAEKLGEYKQNRKDAPKEMLLQIPIALEWLQKMGFTCVEVGGFEADDVIASLATLSPYKTRIYSKDKDFNQLLSDKIALFDGKTEFLAKDCVEKYGILPSQFTDYQGIVGDSSDNYKGVKGIGSKNAKELLQRLGSLEKIYENLDLAKNLLSPKMYQALIQDKGSAFLSKELATLERGCIKEFDFLSCAFPSENPLLKIKDELKEYGFISTLRDLENSPFIVENVPILNSTPILDNTPALDNAPKKSRMIVLESAEPLSMFLEKLENPNARVFMRLVLDKDKKILALAFLLQDQGYFLPLEEALFSPFSLEFLQNAFSQMLQHACIIGHDLKPLLSFLKAKYQVPLENIRIQDTQILAFLKNPEKVGFDEVLKEYLKEDLIPHEKIKDFKTKSKAEKSELLSMELNALKRLCEYFEKGGLEEDLLTLARDIETPFVKVLMGMEFQGFKIDAPYFKRLEQEFKNELNVLERQILDLIGVDFNLNSPKQLGEVLYDKLGLPKNKSHSTDEKNLLKILDKHPSIPLILEYRELNKLFNTYTTPLLRLKDKDDKIHTTFIQTGTATGRLSSHSPNLQNIPVRSPKGLLIRKGFIASSKEYCLLGVDYSQIELRLLAHFSQDKDLMEAFLKGRDIHLETSKALFGEDLAKEKRSIAKSINFGLVYGMGSKKLSETLSIPLSEAKSYIEAYFKRFPSIKDYLNGMREEILKTSKAFTLLGRYRVFDFTGVNDYVKGNYLREGVNAIFQGSASDLLKLGMLKVSERFKNNPSVRLLLQVHDELIFEIEEKNAPELQQEIQRILNDEVYPLRVPLETSAFIAKRWNELKG

SEQ ID NO: 7518 - protein, 206 aa, Helicobacter pylori
  misc_feature (B) LOCATION 1...206
  hypothetical: YES
VIGPLSSQLNAIKWGEFKLGDLFEASNGDFDIQKRHINHKGEFVITAGLSNNGVLGQSDIKAKVFESHTITIDMFGCAFYRSFAYKMVTHARVFSLKPKFEINHKIGLFLSTLFFGYHKKFGYENMCSWAKIKNDKVILPLKPTANTQTLEGIDFDFMEKFIAELEQCRLAELQAYLKATGLENTTLSNDEENALNVFNNSGGGGG

SEQ ID NO: 7519 - protein, 211 aa, Helicobacter pylori
  misc_feature (B) LOCATION 1...211
  hypothetical: YES
MFSIILGGGGGNTPCGLTWQHFKLGDLFEIEKTLSFNKDALTQGQDYDYITRTSQNQGVLQTTGFVNAENLNPPFTWSLGLLQMDFFYRKKSWYAGQFMRKITPKTEIKNKINSRIAHYFTTLLNALKRPLLSVLVRDIDKTFREQKIQLPLKPTAKTQSLDGIDFDFMHTLINALMKQTIQGVVQYCDAKIQATKEVISQETPIQKDSLF

SEQ ID NO: 7520 - protein, 218 aa, Helicobacter pylori
  misc_feature (B) LOCATION 1...218
  hypothetical: YES
SGFDFKKPNAPKVIGPLSSQLNAIKWGEFKLGDLFEASNGDFDIQKRHINHKGEFVITAGLSNNGVLGQSDIKAKVFESHTITIDMFGCAFYRSFAYKMVTHARVFSLKPKFEINHKIGLFLSTLFFGYHKKFGYENMCSWAKIKNDKVILPLKPTANTQTLEGIDFDFMEKFIAELEQCRLAELQAYLKATGLENTTLSNDEENALNVFNNSGGGGG

SEQ ID NO: 7521 - protein, 224 aa, Helicobacter pylori
  misc_feature (B) LOCATION 1...224
  hypothetical: YES
KTPPFLTMKKMPLMFSIILGGGGGNTPCGLTWQHFKLGDLFEIEKTLSFNKDALTQGQDYDYITRTSQNQGVLQTTGFVNAENLNPPFTWSLGLLQMDFFYRKKSWYAGQFMRKITPKTEIKNKINSRIAHYFTTLLNALKRPLLSVLVRDIDKTFREQKIQLPLKPTAKTQSLDGIDFDFMHTLINALMKQTIQGVVQYCDAKIQATKEVISQETPIQKDSLF

SEQ ID NO: 7522 - protein, 406 aa, Helicobacter pylori
  misc_feature (B) LOCATION 1...406
  hypothetical: YES
VIGPLSSQLNAIKWGEFKLGDLFEASNGDFDIQKRHINHKGEFVITAGLSNNGVLGQSDIKAKVFESHTITIDMFGCAFYRSFAYKMVTHARVFSLKPKFEINHKIGLFLSTLFFGYHKKFGYENMCSWAKIKNDKVILPLKPTANTQTLEGIDFDFMEKFIAELEQCRLAELQAYLKATGLENTTLSNDEENALNVFNNSGGGGGNTPCGLTWQHFKLGDLFEIEKTLSFNKDALTQGQDYDYITRTSQNQGVLQTTGFVNAENLNPPFTWSLGLLQMDFFYRKKSWYAGQFMRKITPKTEIKNKINSRIAHYFTTLLNALKRPLLSVLVRDIDKTFREQKIQLPLKPTAKTQSLDGIDFDFMHTLINALMKQTIQGVVQYCDAKIQATKEVISQETPIQKDSLF

SEQ ID NO: 7523 - protein, 284 aa, Helicobacter pylori
  misc_feature (B) LOCATION 1...284
  hypothetical: YES
RPLALIMWWRNIDNRISIKRVVNKPPRGLGKITQEWIFSLLDEEGLNLEEALKIGAFKDKLNPKNEYALKKFTAMIGRLREAFEISVEKFCERFLEETNLLKSYEKEDNYEEREGFVKELLSLVKEHFKTNPTHSLLDFLNESALDVHNTENAQKVSCMSVHMSKGLEFKHVFVIGLEEGFFPHRGFNQESDLEEERRLAYVAITRAKEELQLSYVKERSYFGRKISCSPSVFLEEAQLLQQDKPPKQNHQKDTPIKVGDLIKHKIFGTGEGFRRRKRLAAVCA

SEQ ID NO: 7524 - protein, 361 aa, Helicobacter pylori
  misc_feature (B) LOCATION 1...361
  hypothetical: YES
HQSFKRAFEPRRKGRVFRIMGFEKSILDNLNGAQKIAACHIQGPLLILAGAGSGKTKTLTSRLAYLIGACGVPSENTLTLTFTNKASKEMQERALKLLKNQALIPPLLCTFHRFGLLFLRQHMNLLKRACDFSVLDSDEVKTLCKQLKISNFRASISQIKNGMMDLSVQDSECYKAYELYQNALKKDNLVDFDDLLCLSLKILQDNEKLAKETSERYHYIMVDEYQDTNALQLEFLKQLSFTHHNLCVVGDDDQSIYGFRGADISNILNFSKHFKGAKIVKLETNYRSSAEILACANSLISHNQHRHIKTLQSFKGSHKSVICKEYPTQKEESLDVAYQIQSPFKEGREFRKYRYFVSFKW

SEQ ID NO: 7525 - protein, 681 aa, Helicobacter pylori
  misc_feature (B) LOCATION 1...681
  hypothetical: YES
MGFEKSILDNLNGAQKIAACHIQGPLLILAGAGSGKTKTLTSRLAYLIGACGVPSENTLTLTFTNKASKEMQERALKLLKNQALIPPLLCTFHRFGLLFLRQHMNLLKRACDFSVLDSDEVKTLCKQLKISNFRASISQIKNGMMDLSVQDSECYKAYELYQNALKKDNLVDFDDLLCLSLKILQDNEKLAKETSERYHYIMVDEYQDTNALQLEFLKQLSFTHHNLCVVGDDDQSIYGFRGADISNILNFSKHFKGAKIVKLETNYRSSAEILACANSLISHNQHRHIKTLQSFKGSHKSVICKEYPTQKEESLDVAYQIKALLKKGENLENIAILYRLNGLSRSIEESLNALNIPYRLIGAVSFYERAEVKDALALMHVVAKKDDRFFIKRVLNKPPRGLGKITQEWIFSLLDEEGLNLEEALKIGAFKDKLNPKNEYALKKFTAMIGRLREAFEISVEKFCERFLEETNLLKSYEKEDNYEEREGFVKELLSLVKEHFKTNPTHSLLDFLNESALDVHNTENAQKVSCMSVHMSKGLEFKHVFVIGLEEGFFPHRGFNQESDLEEERRLAYVAITRAKEELQLSYVKERSYFGRKISCSPSVFLEEAQLLQQDKPPKQNHQKDTPIKVGDLIKHKIFGTGRVLGVEKGLSGLCLKINCGGNVYDKISEKFVEKVDNEF

SEQ ID NO: 7526 - protein, 60 aa, Helicobacter pylori
  misc_feature (B) LOCATION 1...60
  hypothetical: YES
SNSRMKRLFFIPFITPFFLNGEPSAFDLKSGAIQKRLKQLQVNSKNFSNIWDQNPFGSGG

SEQ ID NO: 7527 - protein, 307 aa, Helicobacter pylori
  misc_feature (B) LOCATION 1...307
  hypothetical: YES
KAELSKKDSSSCKSIVRIFLIFGTKIHSEVEANTQAREGLRSVYEGQANKIKDLNNAILSQEESLRALKASQEVQANTLKQQSQTLEDLRNEIHANQQAIQQLDKQNKEMSELLTKLSQDLVSQIALIQKALKEQEEKAEKPLKSSTPANKNPPLKAETPKNQEKKTQEKAKVEFDKDLSKQKEIFQEALSFFRNKSYAEAKERLLWLEANSYRLYYVRYVLGEVAYGEKRYREAIKYYEESALLNQKASYMPVLLWHTAWSFKKIKDDQNYYKFLNTLQRLYPSSEQAKMVQKILENKEKHHHAKP

SEQ ID NO: 7528 - protein, 331 aa, Helicobacter pylori
  misc_feature (B) LOCATION 1...331
  hypothetical: YES
MKRLFFIPFITPFFLNGEPSAFDLQSGATKKELKQLQVNSKNFSNILTKIHSQVEANTLSQEGLRSVYEGQANKIKDLNNAILSQEESLRALKASQEVQANTLKQQSQTLEDLRNEIHANQQAIQQLDKQNKEMSELLTKLSQDLVSQIALIQKALKEQEEKAEKPLKSSTPANKNPPLKAETPKNQEKKTQEKAKVEFDKDLSKQKEIFQEALSFFRNKSYAEAKERLLWLEANSYRLYYVRYVLGEVAYGEKRYREAIKYYKESALLNQKASYMPVLLWHTAWSFKKIKDDQNYYKFLNTLQRLYPSSEQAKMVQKILENKEKHHHAKP

SEQ ID NO: 7529 - protein, 103 aa, Helicobacter pylori
  misc_feature (B) LOCATION 1...103
  hypothetical: YES
VTLLSKGYLRNPYNHNRVFLEDILTLENAVLDTRQSDLRLYFNVFPTLRTSRHGLFYTQKGKIKRLNAVESLLLQGFPRDLIAKIKNNPNFKESHLLSQAGNA

SEQ ID NO: 7530 - protein, 213 aa, Helicobacter pylori
  misc_feature (B) LOCATION 1...213
  hypothetical: YES
LGILTFMDFCSGIGGGRLGLERCHLKCVGHAEINHEAIRTYELFFKDTHNFGDLMRINPNDLPNFDVLVSGFPCQAFSINGKRKGLEDERGTIIYGLIRILKVKQPKCFLLENVKGLIHHKQQETFKTIIKALQEAGYTTHYQILNSADFQLAQKRERLYIVGFRKDLKRPFNFPLGLANDYCFKDFLDADNECYLDVSNATFQRILAQPIQP

SEQ ID NO: 7531 - protein, 310 aa, Helicobacter pylori
  misc_feature (B) LOCATION 1...310
  hypothetical: YES
LGILTFMDFCSGIGGGRLGLERCHLKCVGHAEINHEAIRTYELFFKDTHNFGDLMRINPNDLPNFDVLVSGFPCQAFSINGKRKGLEDERGTIIYGLIRILKVKQPKCFLLENVKGLIHHKQQETFKTIIKALQEAGYTTHYQILNSADFQLAQKRERLYIVGFRKDLKRPFNFPLGLANDYCFKDFLDADNECYLDVSNATFQRYLRNPYNHNRVFLEDILTLENAVLDTRQSDLRLYFNVFPTLRTSRHGLFYTQKGKIKRLNAVESLLLQGFPRDLIAKIKNNPNFKESHLLSQAGNAMSVNVIAAI

SEQ ID NO: 7532 - protein, 315 aa, Helicobacter pylori
  misc_feature (B) LOCATION 1...315
  hypothetical: YES
MDFCSGIGGGRLGLERCHLKCVGHAEINHEAIRTYELFFKDTHNFGDLMRINPNDLPNFDVLVSGFPCQAFSINGKRKGLEDERGTIIYGLIRILKVKQPKCFLLENVKGLIHHKQQETFKTIIKALQEAGYTTHYQILNSADFQLAQKRERLYIVGFRKDLKRPFNFPLGLANDYCFKDFLDADNECYLDVSNATFQRYLRNPYNHNRVFLEDILTLENAVLDTRQSDLRLYFNVFPTLRTSRHGLFYTQKGKIKRLNAVESLLLQGFPRDLIAKIKNNPNFKESHLLSQAGNAMSVNVIAAIAKQMLKAFNNE

SEQ ID NO: 7533 - protein, 298 aa, Helicobacter pylori
  misc_feature (B) LOCATION 1...298
  hypothetical: YES
MKILIIEDDLALARSISHNLHDLGHFCEIISSISEENKEPYDVILVSSKVCTQGRCEHFVRYNSKQIIIMMASHVNEDGVNKPIQAGARDYILKPFKMDELLRKIQYHRAYQEMTARLGFYENYLDFIHAELPLPRDFSYRPPFIIHAPSQELANAYLLQYAKERQMDFSFFSLKDTTWKELYKNKDKLERPFYIMHLEELKKDEQLKLLELARSCPIVLSYTHKEPLEFPKIMSIECGNRPLSLFSDNTTFLSIQEYEKEAIRHFSSTCTDTELASKLGISRKSLWEKRRKYNLPRK

SEQ ID NO: 7534 - protein, 302 aa, Helicobacter pylori
  misc_feature (B) LOCATION 1...302
  hypothetical: YES
KEELMKILIIEDDLALARSISHNLHDLGHFCEIISSISEENKEPYDVILVSSKVCTQGRCEHFVRYNSKQIIIMMASHVNEDGVNKPIQAGARDYILKPFKMDELLRKIQYHRAYQEMTARLGFYENYLDFIHAELPLPRDFSYRPPFIIHAPSQELANAYLLQYAKERQMDFSFFSLKDTTWKELYKNKDKLERPFYIMHLEELKKDEQLKLLELARSCPIVLSYTHKEPLEFPKIMSIECGNRPLSLFSDNTTFLSIQEYEKEAIRHFSSTCTDTELASKLGISRKSLWEKRRKYNLPRK

SEQ ID NO: 7535 - protein, 49 aa, Helicobacter pylori
  misc_feature (B) LOCATION 1...49
  hypothetical: YES
GKCALLDSGDSKFIEGDLVSKKLFKEENTRVIALKGEPTIAEPVLFRDH

SEQ ID NO: 7536 - protein, 59 aa, Helicobacter pylori
  misc_feature (B) LOCATION 1...59
  hypothetical: YES
ILWMIAGVTVAEKEDRNTGITSLVVNDYIPSGYKPSLFLEGANGEEMRYFLEPKNFYRH

SEQ ID NO: 7537 - protein, 86 aa, Helicobacter pylori
  misc_feature (B) LOCATION 1...86
  hypothetical: YES
CSRFYRYCHRDLRPLVALDGGKFAVSDVNELYRRVINRNQRLKRLMELGAPEIIVRNEKRMLQEAVDVLFDNGRSTNAVKGANKRP

SEQ ID NO: 7538 - protein, 131 aa, Helicobacter pylori
  misc_feature (B) LOCATION 1...131
  hypothetical: YES
SIQAFRPKPIDGKAIQLHPLVCSAFNADFDGDQMAVHVPLSQEAIAECKVLMLSSMNILLPASGKAVAIPSQDMVLGLYYLSLEKSGVKGEHKLFSSVNEIITAIDTKELDIHAKIRVLDQGNIIATSAGR

SEQ ID NO: 7539 - protein, 141 aa, Helicobacter pylori
  misc_feature (B) LOCATION 1...141
  hypothetical: YES
EFVFPPSLEGTVIDVKVFTKKGYEKDARVLSAYEEEKAKLDMEHFDRLTMLNREELLRVSSLLSQAILEEPFSHNGKDYKEGDQIPKEEVASINRFTLASLVKKYSKEVQNHYEITKNISLEQKKVLGEEHEAKPLYLGKG

SEQ ID NO: 7540 - protein, 168 aa, Helicobacter pylori
  misc_feature (B) LOCATION 1...168
  hypothetical: YES
GFGSREYYRYERGALIIKSILPDFIPTDLWNRPMKKKDIGVLVDYVHKVGGIGITATFLDHLKTLGFRYATKAGISISMEDIITPKDKQKMVEKAKVEVKKIQQQYDQGLLTDQERYNKIIDTWTEVNDRMSKEMMSAIAKDKEGFNSIYMMADSGARGSAAQILSSG

SEQ ID NO: 7541 - protein, 197 aa, Helicobacter pylori
  misc_feature (B) LOCATION 1...197
  hypothetical: YES
WRVQKSQALYRYKTKLKVGDKMAGRHGNKGFFSNIVPVADMPYTADGEPVDIVLNPLGVPSRMNIGQILEMHLGLVGKEFGKQIASMLEDKTKDFAKELRAKMLEIANAINEKDPLTIHVLENCSDEELLEYAKDWSKGVKMAIPVFEGISQEKFYKLFELAKIAMDGKMDLYDGRTGEKMRERVNVGYMYMINFTI

SEQ ID NO: 7542 - protein, 313 aa, Helicobacter pylori
  misc_feature (B) LOCATION 1...313
  hypothetical: YES
KGVCAKCYGLNLDEGKMSYPGEAVGVVAAQSIGEPGTQLTLRTFHVGGTASRSQDEREIVASKEGFVRFYNLRTYTNKEGKNIIANRRNASILVVEPKIKAPFDGELRIETVYEEVVVSVKNGDQEAKFVLRRSDIVKPSELAGVGGKIEGKVYLPYASGHKVHKGGSIADIIQEGWNVPNRIPYARELLVKDNDPIAQNVYAKEKGVIKYYVLEANHLERTHGVKKGDIVSEKGLFAVVADDNGREAARHYIARGSEILIDDNSEVSANSVISKPTTNTFKTIATWDPYNTPIIADFKGKVNFVDDRRGYGR

SEQ ID NO: 7543 - protein, 312 aa, Helicobacter pylori
  misc_feature (B) LOCATION 1...312
  hypothetical: YES
GVCAKCYGLNLDEGKMSYPGEAVGVVAAQSIGEPGTQLTLRTFHVGGTASRSQDEREIVASKEGFVRFYNLRTYTNKEGKNIIANRRNASILVVEPKIKAPFDGELRIETVYEEVVVSVKNGDQEAKFVLRRSDIVKPSELAGVGGKIEGKVYLPYASGHKVHKGGSIADIIQEGWNVPNRIPYARELLVKDNDPIAQNVYAKEKGVIKYYVLEANHLERTHGVKKGDIVSEKGLFAVVADDNGREAARHYIARGSEILIDDNSEVSANSVISKPTTNTFKTIATWDPYNTPIIADFKGKVNFVDDRRGYGR

SEQ ID NO: 7544 - protein, 350 aa, Helicobacter pylori
  misc_feature (B) LOCATION 1...350
  hypothetical: YES
GLKPGMCTPRIMSGLVPIETPVGQYIGLIYTLSTFTRVNDLGFIEAPYKKVVDGKVAGETIYLTAIQEDSHIIAPASTPIDEEGNILGDLIETRVEGEIVLNEKSKVTLMDLSSSMLVGVAASLIPFLEHDDANRALMGTNMQRQAVPLLRSDAPIVGTGIEKIIARDSWGAIKANRAGVVEKIDSKNIYILGEGKEEAYIDAYSLQKNLRTNQNTSFNQVPIVKVGDKVEAGQIIADGPSMDRGELALGKNVRVAFMPWNGYNFEDAIVVSERITKDDVFTSTHIYEKEVDARELKHGVEEFTADIPDVKEEALAHLDESGIVKVGTYVSAGMILVGKTSPKARLKARL

SEQ ID NO: 7545 - protein, 2292 aa, Helicobacter pylori
  misc_feature (B) LOCATION 1...2292
  hypothetical: YES
MCHPTYYGQFGPIETPEGQNIGLINTLSTFTRVNDLGFIEAPYKKVVDGKVAGETIYLTAIQEDSHIIAPASTPIDEEGNILGDLIETRVEGEIVLNEKSKVTLMDLSSSMLVGVAASLIPFLEHDDANRALMGTNMQRQAVPLLRSDAPIVGTGIEKIIARDSWGAIKANRAGVVEKIDSKNIYILGEGKEEAYIDAYSLQKNLRTNQNTSFNQVPIVKVGDKVEAGQIIADGPSMDRGELALGKNVRVAFMPWNGYNFEDAIVVSERITKDDVFTSTHIYEKEVDARELKHGVEEFTADIPDVKEEALAHLDESGIVKVGTYVSAGMILVGKTSPKGEIKSTPEERLLRAIFGDKAGHVVNKSLYCPPSLEGTVIDVKVFTKKGYEKDARVLSAYEEEKAKLDMEHFDRLTMLNREELLRVSSLLSQAILEEPFSHNGKDYKEGDQIPKEEIASINRFTLASLVKKYSKEVQNHYEITKNNFLEQKKVLGEEHEEKLSILEKDDILPNGVIKKVKLYIATKRKLKVGDKMAGRHGNKGIVSNIVPVADMPYTADGEPVDIVLNPLGVPSRMNIGQILEMHLGLVGKEFGKQIASMLEDKTKDFAKELRAKMLEIANAINEKDPLTIHVLENCSDEELLEYAKDWSKGVKMAIPVFEGISQEKFYKLFELAKIAMDGKMDLYDGRTGEKMRERVNVGYMYMIKLHHLVDEKVHARSTGPYSLVTHQPVGGKALFGGQRFGEMEVWALEAYGAAHTLKEMLTIKSDDIRGRENAYRAIAKGEQVGESEIPETFYVLTKELQSLALDINIFGDDVDEDGAPRPIMIKEDDRPKDFSSFQLTLASPEKIHSWSYGEVKKPETINYRTLKPERDGLFCMKIFGPTKDYECLCGKYKKPRFKDIGTCEKCGVAITHSKVRRFRMGHIELATPVAHIWYVNSLPSRIGTLLGVKMKDLERVLYYEAYIVKEPGEAAYDNEGTKLVMKYDILNEEQYQNISRRYEDRGFVAQMGGEAIKDLLEEIDLITLLQSLKEEVKDTNSDAKKKKLIKRLKVVESFLNSGNRPEWMMLTVLPVLPPDLRPLVALDGGKFAVSDVNELYRRVINRNQRLKRLMELGAPEIIVRNEKRMLQEAVDVLFDNGRSTNAVKGANKRPLKSLSEIIKGKQGRFRQNLLGKRVDFSGRSVIVVGPNLKMDECGLPKNMALELFKPHLLSKLEERGYATTLKQAKRMIEQKSNEVWECLQEITEGYPVLLNRAPTLHKQSIQAFHPKLIDGKAIQLHPLVCSAFNADFDGDQMAVHVPLSQEAIAECKVLMLSSMNILLPASGKAVAIPSQDMVLGLYYLSLEKSGVKGEHKLFSSVNEIITAIDTKELDIHAKIRVLDQGNIIATSAGRMIIKSILPDFIPTDLWNRPMKKKDIGVLVDYVHKVGGIGITATFLDHLKTLGFRYATKAGISISMEDIITPKDKQKMVEKAKVEVKKIQQQYDQGLLTDQERYNKIIDTWTEVNDRMSKEMMSAIAKDKEGFNSIYMMADSGARGSAAQIRQLSAMRGLMTKPDGSIIDTPIISNFKEGLNVLEYFNSTHGARKGLADTALKTANAGYLTRKLIDVSQNVKVVSDDCGTHEGIEITDIAVGSELIEPLEERIFGRVLLEDVIDPITNEILLYADTLIDEEGAKKVVEAGIKSITIRTPVTCKAPKGVCAKCYGLNLGEGKMSYPGEAVGVVAAQSIGEPGTQLTLRTFHVGGTASRSQDEREIVASKEGFVRFYNLRTYTNKEGKNIIANRRNASILVVEPKIKAPFDGELRIETVYEEVVVSVKNGDQEAKFVLRRSDIVKPSELAGVGGKIEGKVYLPYASGHKVHKGGSIADIIQEGWNVPNRIPYASELLVKDNDPIAQDVYAKEKGVIKYYVLEANHLERTHGVKKGDIVSEKGLFAVVADDNGREAARHYIARGSEILIDDNSEVSANSVISKPTTNTFKTIATWDPYNTPIIADFKGKVNFVDVIAGVTVAEKEDENTGITSLVVNDYIPSGYKPSLFLEGANGEEMRYFLEPKTSIAISDGSSVEQAEVLAKIPKATVKSRDITGGLPRVSELFEARKPKPKDVAILSEVDGIVSFGKPIRNKEHIIVTSKDGRLTDYFVDKGKQILVHADEFVHAGEAMTDGVVSSHDILRISGEKELYKYIVSEVQQVYRRQGVSIADKHIEIIVSQMLRQVRILDSGDSKFIEGDLVSKKLFKEENTRVIALKGEPAIAEPVLLGITRAAIGSDSIISAASFQETTKVLTEASIAMKKDFL

SEQ ID NO: 7546 - protein, 126 aa, Helicobacter pylori
  misc_feature (B) LOCATION 1...126
  hypothetical: YES
LERPQGKIILLTGKKLTSRKIKELKENHLEWVEYPMDILLNRHLAEPVMVGKEVLLNMLTQLDKNRLEKIHDLGVQEFVIINDLALGHDASIIHSFSADHESLKLLKQTEKIDDENALAAIRIHKA

SEQ ID NO: 7547 - protein, 126 aa, Helicobacter pylori
  misc_feature (B) LOCATION 1...126
  hypothetical: YES
DPFDDRTHFVIINGVERVVVNQLYRSPGVIFKEEESSTSSNKLIYTGQIIPDRGSWLYFEYDSKDVLYARINKRRKVPVTILFRAMDYQKQDIIKMFYPLVKVRYENDKYLTPFASLDANQRMLDW

SEQ ID NO: 7548 - protein, 157 aa, Helicobacter pylori
  misc_feature (B) LOCATION 1...157
  hypothetical: YES
MSKKIPLKNRLRADFTKTPTDLEVPNLLLLQRDSYDSFLYSKDGKESGIEKVFKSIFPIQDEHNRITLEYAGCEFGKSKYTVREAMERGITYSIPLKIKVRLILWEKDTKSGEKNGIKDIKEQSIFIREIPLMTERTSLSLMGWSAWWSISSTEAPV

SEQ ID NO: 7549 - protein, 158 aa, Helicobacter pylori
  misc_feature (B) LOCATION 1...158
  hypothetical: YES
NMSKKIPLKNRLRADFTKTPTDLEVPNLLLLQRDSYDSFLYSKDGKESGIEKVFKSIFPIQDEHNRITLEYAGCEFGKSKYTVREAMERGITYSIPLKIKVRLILWEKDTKSGEKNGIKDIKEQSIFIREIPLMTERTSLSLMGWSAWWSISSTEAPV

SEQ ID NO: 7550 - protein, 418 aa, Helicobacter pylori
  misc_feature (B) LOCATION 1...418
  hypothetical: YES
VIFKEEESSTSSNKLIYTGQIIPDRGSWLYFEYDSKDVLYARINKRRKVPVTILFRAMDYQKQDIIKMFYPLVKVRYENDKYLIPFASLDANQRMEFDLKDPQGKIILLAGKKLTSRKIKELKENHLEWVEYPMDILLNRHLAEPVMVGKEVLLDMLTQLDKNRLEKIHDLGVQEFVIINDLALGHDASIIHSFSADHESLKLLKQTEKIDDENALAAIRIHKVMKPGDPVTTEVAKQFVKKLFFDPERYDLTMVGRMKMNHKLGLHVPDYITTLTHEDIITTVKYLMKIKNNQGKIDDRDHLGNRRIRAVGELLANELHSGLVKMQKTIKDKLTTMSGAFDSLMPHDLVNSKMITSTIMEFFMGGQLSQFMDQTNPLSEVTHKRRLSALGEGGLVKDRVGFEARDVPPHVLWPIWSH

SEQ ID NO: 7551 - protein, 575 aa, Helicobacter pylori
  misc_feature (B) LOCATION 1...575
  hypothetical: YES
MSKKIPLKNRLRADFTKTPTDLEVPNLLLLQRDSYDSFLYSKDGKESGIEKVFKSIFPIQDEHNRITLEYAGCEFGKSKYTVREAMERGITYSIPLKIKVRLILWEKDTKSGEKNGIKDIKEQSIFIREIPLMTERTSFIINGVERVVVNQLYRSPGVIFKEEESSTSSNKLIYTGQIIPDRGSWLYFEYDSKDVLYARINKRRKVPVTILFRAMDYQKQDIIKMFYPLVKVRYENDKYLIPFASLDANQRMEFDLKDPQGKIILLAGKKLTSRKIKELKENHLEWVEYPMDILLNRHLAEPVMVGKEVLLDMLTQLDKNRLEKIHDLGVQEFVIINDLALGHDASIIHSFSADHESLKLLKQTEKIDDENALAAIRIHKVMKPGDPVTTEVAKQFVKKLFFDPERYDLTMVGRMKMNHKLGLHVPDYITTLTHEDIITTVKYLMKIKNNQGKIDDRDHLGNRRIRAVGELLANELHSGLVKMQKTIKDKLTTMSGAFDSLMPHDLVNSKMITSTIMEFFMGGQLSQFMDQTNPLSEVTHKRRLSALGEGGLVKDRVGFEARDVPPHVLWPIWSH

SEQ ID NO: 7552 - protein, 620 aa, Helicobacter pylori
  misc_feature (B) LOCATION 1...620
  hypothetical: YES
MLKTPLKTLLDILINHFTKECLITLITEHDEKLLIFMLEHENANDYKKHFFKTIANSLVFNEKALLECLEIKELEKSFTRFKNKIGLFSQEGFIKSSELVVLNFPFKDNVLLGNAKDNSTKSNELFYHEILHKNEIDTLLSPKALCRFEMHGQGDLQSALKDENTNYLIKGNNLIALHSLKKKFAKKVKCIYIDPPYNTGNDSFNYNDNFNHSSWLVFMKNRLEAAREFLSDDGVIFVQCDDNEQAYLKVLMDEIFGRENFIACFVWEKTSNSLSRIRIKTEYILCYEQTKFGLIFNGDMAEEGQDFPILNEVNVKRTLQFPPNSIYFKTFKGVIKPTKFNKMELIDDLRIVNKTNSNMVRINAKFKWTQDKLDDEIKEGTTFVIKSDEFSMRYIRKGDREVKASNVFNAECGVTTNIKATSEIKVLFANSNTDLFSTPKPEALLQRILEISTNENDLVLDFFAGSGTTCAVAHKMKRRYIGIEQMDYIETITKERLKKVIEGEQGGISKKCDFKGGGSFVYAELKEVNSGIKKQILNAKSASECLKIFNDLNKRILKRADNKMDAIHSEEFQNLDLNEQKRKCCASLDANEDYLNLGDIDEDAWEIDEITKKYNEIFYS

SEQ ID NO: 7553 - protein, 623 aa, Helicobacter pylori
  misc_feature (B) LOCATION 1...623
  hypothetical: YES
GQRMLKTPLKTLLDILINHFTKECLITLITEHDEKLLIFMLEHENANDYKKHFFKTIANSLVFNEKALLECLEIKELEKSFTRFKNKIGLFSQEGFIKSSELVVLNFPFKDNVLLGNAKDNSTKSNELFYHEILHKNEIDTLLSPKALCRFEMHGQGDLQSALKDENTNYLIKGNNLIALHSLKKKFAKKVKCIYIDPPYNTGNDSFNYNDNFNHSSWLVFMKNRLEAAREFLSDDGVIFVQCDDNEQAYLKVLMDEIFGRENFIACFVWEKTSNSLSRIRIKTEYILCYEQTKFGLIFNGDMAEEGQDFPILNEVNVKRTLQFPPNSIYFKTFKGVIKPTKFNKMELIDDLRIVNKTNSNMVRINAKFKWTQDKLDDEIKEGTTFVIKSDEFSMRYIRKGDREVKASNVFNAECGVTTNIKATSEIKVLFANSNTDLFSTPKPEALLQRILEISTNENDLVLDFFAGSGTTCAVAHKMKRRYIGIEQMDYIETITKERLKKVIEGEQGGISKKCDFKGGGSFVYAELKEVNSGIKKQILNAKSASECLKIFNDLNKRILKRADNKMDAIHSEEFQNLDLNEQKRKCCASLDANEDYLNLGDIDEDAWEIDEITKKYNEIFYS

SEQ ID NO: 7554 - protein, 281 aa, Helicobacter pylori
  misc_feature (B) LOCATION 1...281
  hypothetical: YES
MRVFIIHLSPKTCKNFSLKETHITPLLESLKLQGISYEIFDAIYSKISPTQLHPLILEHLHPSFMVEDLLAFCKNKKHPPCALKNFFYALKHCGKRMGFGELGCYASHYSLWQKCIELNEAICILEDDITLKEHFKESLEFCRQHINELGYIRLMHLEENVAKQKTPVKGVSQILNFKDGIGTQGYVLAPKAAQKLLKYSAKEWVMPIDCVMDRHYWHGVKNYVLEEFAIACDGINAQNSNTEKQRPKRLPLSIRIGRFLHKSAIQQWNILKSFFPNHIIK

SEQ ID NO: 7555 - protein, 296 aa, Helicobacter pylori
  misc_feature (B) LOCATION 1...296
  hypothetical: YES
GCLTLILFVLRIKANMRVFIIHLSPKTCKNFSLKETHITPLLESLKLQGISYEIFDAIYSKISPTQLHPLILEHLHPSFMVEDLLAFCKNKKHPPCALKNFFYALKHCGKRMGFGELGCYASHYSLWQKCIELNEAICILEDDITLKEHFKESLEFCRQHINELGYIRLMHLEENVAKQKTPVKGVSQILNFKDGIGTQGYVLAPKAAQKLLKYSAKEWVMPIDCVMDRHYWHGVKNYVLEEFAIACDGINAQNSNTEKQRPKRLPLSIRIGRFLHKSAIQQWNILKSFFPNHIIK

SEQ ID NO: 7556 - protein, 446 aa, Helicobacter pylori
  misc_feature (B) LOCATION 1...446
  hypothetical: YES
MKSRPILAQAYALQMMVKQIAFLETILVENEQDALILENSLIKQLKPKYNILLRDDKTYPYIYMDFSIDFPIPLITRKILKQPGVKYFGPFTSGAKDILDSLYELLPLVQKKNCIKDKKACMFYQIERCKAPCEDKITKEEYLKIAKECLEMIENKDRLIKELELKMERLSSNLRFEEALIYRDRIAKIQKIAPFTCMDLAKLYDLDIFAFYGGNNKAVLVKMFMRGGKIISSAFEKIHSLNGFDTDEAMKQAIINHYQSHLPLMPEQILLSACSNETLKELQEFISHQYSKKIALSIPKKGDKLALIEIAMKNAQEIFSQEKTSNEDRILEEARSLFNLECVPYRVEIFDTSHHSNSQCVGGMVVYENNAFQKDSYRRYHLKGSNEYDQMSELLTRRALDFAKEPPPNLWVIDGGRAQLNIALEILKSSGSFVEVIAISKEKRGF

SEQ ID NO: 7557 - protein, 594 aa, Helicobacter pylori
  misc_feature (B) LOCATION 1...594
  hypothetical: YES
MADLLSSLKNLSSSSGVYQYFDKNRQLLYIGKAKNLKKRIKSYFSVRNNEITPNPRTSLRVQMMVKQIAFLETILVENEQDALILENSLIKQLKPKYNILLRDDKTYPYIYMDFSIDFPIPLITRKILKQPGVKYFGPFTSGAKDILDSLYELLPLVQKKNCIKDKKACMFYQIERCKAPCEDKITKEEYLKIAKECLEMIENKDRLIKELELKMERLSSNLRFEEALIYRDRIAKIQKIAPFTCMDLAKLYDLDIFAFYGGNNKAVLVKMFMRGGKIISSAFEKIHSLNGFDTDEAMKQAIINHYQSHLPLMPEQILLSACSNETLKELQEFISHQYSKKIALSIPKKGDKLALIEIAMKNAQEIFSQEKTSNEDRILEEARSLFNLECVPYRVEIFDTSHHSNSQCVGGMVVYENNAFQKDSYRRYHLKGSNEYDQMSELLTRRALDFAKEPPPNLWVIDGGRAQLNIALEILKSSGSFVEVIAISKEKRDSKAYRSKGGAKDIIHTISHTFKLLPSDKRLQWVQKLRDESHRYAINFHRSTKLKNMKQIALLKEKGIGEASVKKLLDYFGSFEAIEKASDQEKNAVLKKRK

SEQ ID NO: 7558 - protein, 594 aa, Helicobacter pylori; identical to SEQ ID NO: 7557
  misc_feature (B) LOCATION 1...594
  hypothetical: YES

SEQ ID NO: 7559 - protein, 55 aa, Helicobacter pylori
  misc_feature (B) LOCATION 1...55
  hypothetical: YES
NDRIDDKEYYFSDTYALDFKEVKGQAVAKEAALIASAGFHNLILEEVQGREKHDH

SEQ ID NO: 7560 - protein, 106 aa, Helicobacter pylori
  misc_feature (B) LOCATION 1...106
  hypothetical: YES
ASLFWTGLICLWKSKRGIIKTRHRISWTSKEMHELVLLAFKQQKLRKQSAFNGKLNEEQIERFCPLNTEAQKLLKQAVERFNLSMRSVNKAKKVARTIADLKLARI

SEQ ID NO: 7561 - protein, 105 aa, Helicobacter pylori
  misc_feature (B) LOCATION 1...105
  hypothetical: YES
ASLFWTGLICLWKSKRGIIKTRHRISWTSKEMHELVLLAFKQQKLRKQSAFNGKLNEEQIERFCPLNTEAQKLLKQAVERFNLSMRSVNKAKKVARTIADLKLAR

SEQ ID NO: 7562 - protein, 154 aa, Helicobacter pylori
  misc_feature (B) LOCATION 1...154
  hypothetical: YES
ASRQRLLPFRSFRNPHQSASKSSILGFSFFREPKPGEIALAHNGMLFFDELPHFKKDILEALREPLENNKLVISRVHSKIEYETSFLFVGAQNPCLCGNLLSATKTSVCQDREITQYKNRLSEPFLDRIDLFVEIEEGNYKDTPSHFLDFKRDA

SEQ ID NO: 7563 - protein, 177 aa, Helicobacter pylori
  misc_feature (B) LOCATION 1...177
  hypothetical: YES
KRTQRAAKKTKTQVTTMINTIFCATMQRGVAEIVAVKATFTRALPAFVISGLANNSIQEAKQRVQSALQNNDFTFPPLKITINLSPSDLPKSGSHFDLPIALLIALQKQELAFKEWFAFGELGLDGKIKPNSNIFPMLLDIAIKRPHAKIIAPKANEELFSLIPNFNVFLWSILKKR

SEQ ID NO: 7564 - protein, 490 aa, Helicobacter pylori
  misc_feature (B) LOCATION 1...490
  hypothetical: YES
MINTIFCATMQRGVAEIVAVEATFTRALPAFVISGLANNSIQEAKQRVQSALQNNDFTFPPLKITINLSPSDLPKSGSHFDLPIALLIALQKQELAFKEWFAFGELGLDGKIKPNSNIFPMLLDIAIKRPHAKIIAPKANEELFSLIPNLQCFFVEHFKEALEILQTPEIKADTHTKKLPFKTIELNDKEYYFSDTYALDFKEVKGQAVAKEAALIASAGFHNLILEGSPGCGKSMIINRMRYILPPLSLNEILEATKLRILSEQDSAYYPLRSFRNPHQSASKSSILGSSSLREPKPGEIALAHNGMLFFDELPHFKKDILEALREPLENNKLVISRVHSKIEYETSFLFVGAQNPCLCGNLLSATKACRCQDREITQYKNRLSEPFLDRIDLFVQMEEGNYKDTPSHSWTSKEMHELVLLAFKQQKLRKQSAFNGKLNEEQIERFCPLNTEAQKLLKQAVERFNLSMRSVNKAKKVARTIADLKLARI

SEQ ID NO: 7565 - protein, 200 aa, Helicobacter pylori
  misc_feature (B) LOCATION 1...200
  hypothetical: YES
MPNHQPVKKFKIIGGACKGLGLNLPNISSTRPTKAIVRESFFNTLQTEINGAHFIEVFSGSASMGLEALSRGAKSAVFFEQNKNAYATLLENISLFKNRLKKEIEIQTFLDDAFKLLPTLRLKNGVLNIIYLDPPFETSGFLGIYEKCFHALERLLNRSHSKNLFVVFEHESLHEMPKSLATLAIIKQKKFGKTTLTYFQ

SEQ ID NO: 7566 - protein, 210 aa, Helicobacter pylori
  misc_feature (B) LOCATION 1...210
  hypothetical: YES
AITRRIHPQIMPNHQPVKKFKIIGGACKGLGLNLPNISSTRPTKAIVRESFFNTLQTEINGAHFIEVFSGSASMGLEALSRGAKSAVFFEQNKNAYATLLENISLFKNRLKKEIEIQTFLDDAFKLLPTLRLKNGVLNIIYLDPPFETSGFLGIYEKCFHALERLLNRSHSKNLFVVFEHESLHEMPKSLATLAIIKQKKFGKTTLTYFQ

SEQ ID NO: 7567 - protein, 240 aa, Helicobacter pylori
  misc_feature (B) LOCATION 1...240
  hypothetical: YES
SIDMILISPRYDNVRNYQGYTFAFENIANEIFRVIKEGGVVVWIVGGEVKNGNKNITSFRQALYFQQIGFNMHDVMIYAKKNTPFMRSNAYTNAYEYMFVLSKGKPKTFNPLKEPTARNGMEMLVTNKGADAKNNKILKELKKEKTKNNIWHYAVGLGGSTNDKIAFNHPAIFPEQLALDHILSWSNERDIVFDPMCGSGTTCKMAFLHNRNFIGVDISKEYIQIAQKRLQQYQQGLFVC

SEQ ID NO: 7568 - protein, 239 aa, Helicobacter pylori
  misc_feature (B) LOCATION 1...239
  hypothetical: YES
IDMILISPRYDNVRNYQGYTFAFENIANEIFRVIKEGGVVVWIVGGEVKNGNKNITSFRQALYFQQIGFNMHDVMIYAKKNTPFMRSNAYTNAYEYMFVLSKGKPKTFNPLKEPTARNGMEMLVTNKGADAKNNKILKELKKEKTKNNIWHYAVGLGGSTNDKIAFNHPAIFPEQLALDHILSWSNERDIVFDPMCGSGTTCKMAFLHNRNFIGVDISKEYIQIAQKRLQQYQQGLFVC

SEQ ID NO: 7569 - protein, 272 aa, Helicobacter pylori
  misc_feature (B) LOCATION 1...272
  hypothetical: YES
MTAKIKPNIQSLLNNFYVDSCVNFMQHKLQNESIDMILTSPPYDNLRNYQGYTFAFENIANEIFRVIKKGGVVVWIVGDKIKNGNKSLTSFRQALYFQQIGFNMHDVMIYAKKNTPFMRSNAYTNAYEYMFVLSKGKPKTFNPLKEPTARNGMEMLVTNKGADAKNNKILKELKKEKTKNNIWHYAVGLGGSTNDKIAFNHPAIFPEQLALDHILSWSNERDIVFDPMCGSGTTCKMAFLHNRNFIGVDISKEYIQIAQKRLQQYQQGLFVC

SEQ ID NO: 7570 - protein, 90 aa, Helicobacter pylori
  misc_feature (B) LOCATION 1...90
  hypothetical: YES
MNKTIKAAALAYNMGQDHAPKVIASGVGEVAKRIIQKAKEYDIALFSNPMLVDSLLKVELDCAIPEELYESVVQVFLWLNSVENNAQMSK

SEQ ID NO: 7571 - protein, 90 aa, Helicobacter pylori; identical to SEQ ID NO: 7570
  misc_feature (B) LOCATION 1...90
  hypothetical: YES

SEQ ID NO: 7572 - protein, 90 aa, Helicobacter pylori; identical to SEQ ID NO: 7570
  misc_feature (B) LOCATION 1...90
  hypothetical: YES

SEQ ID NO: 7573 - protein, 121 aa, Helicobacter pylori
  misc_feature (B) LOCATION 1...121
  hypothetical: YES
VDSILIDEARTPLIISGPVDRRMENYNKADEVAKSMQVEVDFTIDEKNRAILITEEGIKKAENLFGVDNLYKIENAALSHHLDQALKANYLFFIDKDYIVANNEVVIVDKFTDRLNEGEAL

SEQ ID NO: 7574 - protein, 153 aa, Helicobacter pylori
  misc_feature (B) LOCATION 1...153
  hypothetical: YES
RTKKPDRTHRVFADFRQRRREHLYMMDISKTGINLRGYNPKRPPCRIQIRELQPFLRLIGDIKIERSQTFSKIQFGNEQDSSDAERYLDNFSEEREHESVTYRHEEALDEDLNVAVKAFSKTPKRNEPCPCGSGKKYKDCCAKSGPKKGLFAK

SEQ ID NO: 7575 - protein, 198 aa, Helicobacter pylori
  misc_feature (B) LOCATION 1...198
  hypothetical: YES
VSIKEESQTLADITFQNYFRMFSKLSGMTGTAQTEATEFLEIYNLEVVSIPTNLAIKRKDLNDLIYKSEKEKFDAVILKIKELHDKGQPVLVGTASIEKSETLHALLKKERIPHTVLNAKQHTKEAEIIKDAGLKGAVTIATNMAGRGVDIKLTDEVKELGGLYIIGTERHESRRIDNQLRGRSGRQGDPGVSQFYLS

SEQ ID NO: 7576 - protein, 354 aa, Helicobacter pylori
  misc_feature (B) LOCATION 1...354
  hypothetical: YES
RGVSIKEESQTLADITFQNYFRMFSKLSGMTGTAQTEATEFLEIYNLEVVSIPTNLAIKRKDLNDLIYKSEKEKFDAVILKIKELHDKGQPVLVGTASIEKSETLHALLKKERIPHTVLNAKQHTKEAEIIKDAGLKGAVTIATNMAGRGVDIKLTDEVKELGGLYIIGTERHESRRIDNQLRGRSGRQGDPGVSQFYLSLEDNLLRIFGSDRTKGVMEKLGPKDGEHIEFKLVTRAVENAQKKVENLHFDSRKHLLEYDDVANEQRTSVYNLRDELLDINYDISAKIAENREYALNQIFSKLKAFDHQNLSEEELLGLKNILKEDFNASVELEDLEKASPIEIFVAEKLKSGL

SEQ ID NO: 7577 - protein, 356 aa, Helicobacter pylori
  misc_feature (B) LOCATION 1...356
  hypothetical: YES
KVTTTMIKAIIGKIIGTRNDRWIKQYKKKVLAINALEPTYEKMSDVELQNAFEELKKRVRSVEKDLQEKTLLEVLPESFAITREASKRILKMRHFDVQLIGGMVLNDGKIAEMKTGEGKTLVATLAVALNAMKGESVYVVTVNDYLAHRDSKEMEPLYQFLGYSVGTITASVRDDDERLEIYSKDIVYGTNNEFGFDYLRDNMKYSLEHKVQKSHAFAIVDEVDSILIDEARTPLIISGPVDRRMENYNKADEVAKSMQVEVDFTIDEKNRAILITEEGIKKAENLFGVDNLYKIENAALSHHLDQALKANYLFFIDKDYIVANNEVVIVDEFTGRLSEGRRFSEGLHQALEAKEA

SEQ ID NO: 7578 - protein, 865 aa, Helicobacter pylori
  misc_feature (B) LOCATION 1...865
  hypothetical: YES
MIKAIIGKIIGTRNDRWIKQYKKKVLAINALEPTYEKMSDVELQNAFEELKKRVRSVEKDLQEKTLLEVLPESFAITREASKRILKMRHFDVQLIGGMVLNDGKIAEMKTGEGKTLVATLAVALNAMKGESVYVVTVNDYLAHRDSKEMEPLYQFLGYSVGTITASVRDDDERLEIYSKDIVYGTNNEFGFDYLRDNMKYSLEHKVQKSHAFAIVDEVDSILIDEARTPLIISGPVDRRMENYNKADEVAKSMQVEVDFTIDEKNRAILITEEGIKKAENLFGVDNLYKIENAALSHHLDQALKANYLFFIDKDYIVANNEVVIVDEFTGRLSEGRRFSEGLHQALEAKEGVSIKEESQTLADITFQNYFRMFSKLSGMTGTAQTEATEFLEIYNLEVVSIPTNLAIKRKDLNDLIYKSEKEKFDAVILKIKELHDKGQPVLVGTASIEKSETLHALLKKERIPHTVLNAKQHTKEAEIIKDAGLKGAVTIATNMAGRGVDIKLTDEVKELGGLYIIGTERHESRRIDNQLRGRSGRQGDPGVSQFYLSLEDNLLRIFGSDRIKGVMEKLGLKDGEHIESKLVTRAVENAQKKVENLHFESRKHLLEYDDVANEQRKSVYKFRDELLDINYDISAKIAENREYALNQIFSKLKAFDHQNLSEEELLGLKNILKEDFNASVELEDLEKASPIEKFVAEKLKSDYENKMKALDSEQRSRIERIVYLQILDNAWREHLYTMDNLKTGINLRGYNQKDPLVEYKKESYNLFLELIGDIKIEAIQTFSKIQFENEQDSSDAERYLDNFSEEREHESVTYRHEEALDEDLNVAVKAFSKTPKRNEPCPCGSGKKYKDCCAKSGPKKGLFAK

SEQ ID NO: 7579 - protein, 81 aa, Helicobacter pylori
  misc_feature (B) LOCATION 1...81
  hypothetical: YES
IRFQDDEKALDRALVELKNAFTNDVHHKVARELLQKVETQTKAGGIGKQQFLDALEKSLLEILSAKGSSGFTFAQRPPPWF

SEQ ID NO: 7580 - protein, 204 aa, Helicobacter pylori
  misc_feature (B) LOCATION 1...204
  hypothetical: YES
VSGVVLSKFDSDSKGGIALGITYQLGLPLRFIGSGEKIPDLDVFMPERIVGRLMGAGDIISLAEKTASVLNPNEAKDLSKKLKKGQFTFNDFLNQIEKVKKLGSMSSLISMIPGLGNMASALKDTDLESSLEVKKIKAMVNSMTKKERENPEILNGSRRKRIALGXGLEXXEINRIIKRFDQASKMAKRLTNKKGISDLMNLXX

SEQ ID NO: 7581 - protein, 366 aa, Helicobacter pylori
  misc_feature (B) LOCATION 1...366
  hypothetical: YES
REQWFHFRSTPPTVVLMAGLQGSGKTTTTAKLAHYLKTKNKKVLLCACDLQRLAAVEQLKVLGEQVGVEVFHEENKSVKEIANNALKRAKEAQFDVLIVDSAGRLAIDKELMQELKEVKEVLNPHEVLYVADALSGQDGVKSANTFNEEIGVSGVVLSKFDSDSKGGIALGITYQLGLPLRFIGSGEKIPDLDVFMPERIVGRLMGAGDIISLAEKTASVLNPNEAKDLSKKLKKGQFTFNDFLNQIEKVKKLGSMSSLISMIPGLGNMASALKDTDLESSLEVKKIKAMVNSMTKKERENPEILNGSRRKRIALGSGLEVSEINRIIKRFDQASKMAKRLTNKKGISDLMNLMSQAKNQTPPKMR

SEQ ID NO: 7582 - protein, 448 aa, Helicobacter pylori
  misc_feature (B) LOCATION 1...448
  hypothetical: YES
MFQALSDGFKNALNKIRFQDDEKALDRALDELKKTLLKNDVHHKVARELLKKVESQTKAGGIGKQQFLDALEKSLLEILSAKGSSGFTFAQTPPTVVLMAGLQGSGKTTTTAKLAHYLKTKNKKVLLCACDLQRLAAVEQLKVLGEQVGVEVFHEENKSVKEIANNALKRAKEAQFDVLIVDSAGRLAIDKELMQELKEVKEVLNPHEVLYVADALSGQDGVKSANTFNEEIGVSGVVLSKFDSDSKGGIALGITYQLGLPLRFIGSGEKIPDLDVFMPERIVGRLMGAGDIISLAEKTASVLNPNEAKDLSKKLKKGQFTFNDFLNQIEKVKKLGSMSSLISMIPGLGNMASALKDTDLESSLEVKKIKAMVNSMTKKERENPEILNGSRRKRIALGSGLEVSEINRIIKRFDQASKMAKRLTNKKGISDLMNLMSQAKNQTPPKMR

SEQ ID NO: 7583 - protein, 166 aa, Helicobacter pylori
  misc_feature (B) LOCATION 1...166
  hypothetical: YES
ARLYNEKLKEKLIENLDEKILFDLPKTIIEQEMDLLFRNALYSMQAEEVKSLQDSQEKAKEKRESFRNDATKSVKITFVIDALAKEEKIGVHDNEVFQTLYYEAMMTGQNPENLIEQYRKNNMLAAVKMAMIEDRVLAYLLDKNLPKEQQEILEKMRPNAQKTQVG

SEQ ID NO: 7584 - protein, 261 aa, Helicobacter pylori
  misc_feature (B) LOCATION 1...261
  hypothetical: YES
PLRKEMNLEVKKIDTANARLSAKPSIEDLEKRYDKIAQKIAQKVKIDGFRRGKVPLSLVKTRYQAQIEQDAQEEMIQEVLKNALKELGVETKDLIGSPNFTKFEKKDTHFEIEADIGLKPTIVLDKIQECVPSVGVEVPNEEKVNERLKQLAKDYAKFVDTDSQRKAQNDDKLTIDFEGFIDNAPFEGGKAENFSLILGSKQMLEDFEKALLGMQASEENEFPLTFPSGYHAEALAGQETLFRVRLRQIQVREALEINDEL

SEQ ID NO: 7585 - protein, 262 aa, Helicobacter pylori
  misc_feature (B) LOCATION 1...262
  hypothetical: YES
PLRKEMNLEVKKIDTANARLSAKPSIEDLEKRYDKIAQKIAQKVKIDGFRRGKVPLSLVKTRYQAQIEQDAQEEMIQEVLKNALKELGVETKDLIGSPNFTKFEKKDTHFEIEADIGLKPTIVLDKIQECVPSVGVEVPNEEKVNERLKQLAKDYAKFVDTDSQRKAQNDDKLTIDFEGFIDNAPFEGGKAENFSLILGSKQMLEDFEKALLGMQASEENEFPLTFPSGYHAEALAGQETLFRVRLRQIQVREALEINDELA

SEQ ID NO: 7586 - protein, 451 aa, Helicobacter pylori
  misc_feature (B) LOCATION 1...451
  hypothetical: YES
MNLEVKKIDTANARLSAKPSIEDLEKRYDKIAQKIAQKVKIDGFRRGKVPLSLVKTRYQAQIEQDAQEEMIQEVLKNALKELGVETKDLIGSPNFTKFEKKDTHFEIEADIGLKPTIVLDKIQECVPSVGVEVPNEEKVNERLKQLAKDYAKFVDTDSQRKAQNDDKLTIDFEGFIDNAPFEGGKAENFSLILGSKQMLEDFEKALLGMQASEEKEFPLTFPSGYHAEHLAGKEALFKVKLRQIQVREALEINDELAKIVLANEENATLELLKERVKGQLFLENKARLYNEELKEKLIENLDEKILFDLPKTIIEQEMDLLFRNALYSMQAEEVKSLQDSQEKAKEKRESFRNDATKSVKITFVIDALAKEEKIGVHDNEVFQTLYYEAMMTGQNPENLIEQYRKNNMLAAVKMAMIEDRVLAYLLDKNLPKEQQEILEKMRPNAQKTQVG

SEQ ID NO: 7587 - protein, 72 aa, Helicobacter pylori
  misc_feature (B) LOCATION 1...72
  hypothetical: YES
VGSGYYDSRGGKLLKNKQLLSIAKQHCKDSYLVEDENELELAWFKDKKLCGLRWASTPDWIIENVKQKISTI

SEQ ID NO: 7588 - protein, 182 aa, Helicobacter pylori
  misc_feature (B) LOCATION 1...182
  hypothetical: YES
MEIKMAKDYGFCFGVKRAIQIAEKNQNSLIFGSLIHNAKEINRLEKNFNVKIEEDPKKIPKNKSVIIRTHGIPKQDLEYLKNKGVKITDATCPYVIKPQQIVESMSKEGYQIVLFGDINHPEVKGVISYATNQALVGNSLEELQEKKLQRKVALVSQTTQANPKTLANRFLFGGXCTEVRIF

SEQ ID NO: 7589 - protein, 192 aa, Helicobacter pylori
  misc_feature (B) LOCATION 1...192
  hypothetical: YES
NARTFLSQPFSFGSIYSKKGVSMEIKMAKDYGFCFGVKRAIQIAEKNQNSLIFGSLIHNAKEINRLEKNFNVKIEEDPKKIPKNKSVIIRTHGIPKQDLEYLKNKGVKITDATCPYVIKPQQIVESMSKEGYQIVLFGDINHPEVKGVISYATNQALVVNSLEELQEKKLQRKVALVSQTTKQTPKLLQIAS

SEQ ID NO: 7590 - protein, 274 aa, Helicobacter pylori
  misc_feature (B) LOCATION 1...274
  hypothetical: YES
MEIKMAKDYGFCFGVKRAIQIAEKNQNSLIFGSLIHNAKEINRLEKNFNVKIEEDPKKIPKNKSVIIRTHGIPKQDLEYLKNKGVKITDATCPYVIKPQQIVESMSKEGYQIVLFGDINHPEVKGVISYATNQALVVNSLEELQEKKLQRKVALVSQTTKQTPKLLQIASYLVERCTEVRIFNTICNATSYNQKAALDLSKEVDIMIVVGGKTSSNTKQLLSIAKQHCKDSYLVEDENELELAWFKDKKLCGITAGASTPDWIIENVKQKISTI

SEQ ID NO: 7591 - protein, 380 aa, Helicobacter pylori
  misc_feature (B) LOCATION 1...380
  hypothetical: YES
LYPCWGEFVFHASARQTRERERVKLFYQIHCLVEDLSLENIAKLEETIAPFSAFSSIEFLDITDKELEPRHNYYKLDPLIAGEIKKLYLKLNAFSQKRFSKMIMCRFFFASLFPQYDKMIMFDVDTLFVGDISESFFIPLGTHYFGAVREKDLIAMDRNSAKDLYELRQMHAKSIGIADAFPNLEETQILFDNYFNAGFLALNLKSWRKENLENQLIEFFLLKNEKLLFNDQDALCFVCRGRILELPYSYNAHPSFLDTPSFPSIKEACMLHFWGDKPWKLLSVIGAKKWHEALIQTPFKDAYFNAPFLDHLFESLQNKDKETQEIHAFNKALSFSDKRYSFEFLLPRLSSKLLVGFSLFKIKRKAKRLVKKMLKVFFKI

SEQ ID NO: 7592 - protein, 381 aa, Helicobacter pylori
  misc_feature (B) LOCATION 1...381
  hypothetical: YES
LLYPCWGEFVFHASARQTRERERVKLFYQIHCLVEDLSLENIAKLEETIAPFSAFSSIEFLDITDKELEPRHNYYKLDPLIAGEIKKLYLKLNAFSQKRFSKMIMCRFFFASLFPQYDKMIMFDVDTLFVGDISESFFIPLGTHYFGAVREKDLIAMDRNSAKDLYELRQMHAKSIGIADAFPNLEETQILFDNYFNAGFLALNLKSWRKENLENQLIEFFLLKNEKLLFNDQDALCFVCRGRILELPYSYNAHPSFLDTPSFPSIKEACMLHFWGDKPWKLLSVIGAKKWHEALIQTPFKDAYFNAPFLDHLFESLQNKDKETQEIHAFNKALSFSDKRYSFEFLLPRLSSKLLVGFSLFKIKRKAKRLVKKMLKVFFKI

SEQ ID NO: 7593 - protein, 130 aa, Helicobacter pylori
  misc_feature (B) LOCATION 1...130
  hypothetical: YES
MDALEITQKLISYPTITPKECGIFEYIKSLFPAFKTLECEKNGVKNLFLYRIFNPLKKHAEKEHAKEKHVKENVXPLHFCXAGHIXVVPPGXXXXXDSFXXIIKEGFLYGRGAQDMKGGVGXFXRCXXKF

SEQ ID NO: 7594 - protein, 388 aa, Helicobacter pylori
  misc_feature (B) LOCATION 1...388
  hypothetical: YES
MDALEITQKLISYPTITPKECGIFEYIKSLFPAFKTLECEKNGVKNLFLYRIFNPLKKHAEKEHAKEKHVKENVKPLHFCFAGHIDVVPPGNNWQSDPFKPIIKEGFLYGRGAQDMKGGVGAFLSASLNFNPKTPFLLSILLTSDEEGPGIFGTRLMLEKLKEKDLLPHMAIVAEPTCEKVLGDSIKIGRRGSINGKLILKGVQGHVAYPQKCQNPIDTLASVLPLISGVHLDNGDECFDPSKLVITNLHAGLGANNVTPGSVEIAFNARHSLKTTQESLKEYLEKVLKDLPYTLELESSSSPFITASHSKLTSVLQENILKTCHTTPLLNTKGGTSDARFFSAHGIEVVEFGAINDRIHAVDERVSLKELELLEKVFLGVLEGLSEK

SEQ ID NO: 7595 - protein, 391 aa, Helicobacter pylori
  misc_feature (B) LOCATION 1...391
  hypothetical: YES
RIGMDALEITQKLISYPTITPKECGIFEYIKSLFPAFKTLECEKNGVKNLFLYRIFNPLKKHAEKEHAKEKHVKENVKPLHFCFAGHIDVVPPGNNWQSDPFKPIIKEGFLYGRGAQDMKGGVGAFLSASLNFNPKTPFLLSILLTSDEEGPGIFGTRLMLEKLKEKDLLPHMAIVAEPTCEKVLGDSIKIGRRGSINGKLILKGVQGHVAYPQKCQNPIDTLASVLPLISGVHLDNGDECFDPSKLVITNLHAGLGANNVTPGSVEIAFNARHSLKTTQESLKEYLEKVLKDLPYTLELESSSSPFITASHSKLTSVLQENILKTCHTTPLLNTKGGTSDARFFSAHGIEVVEFGAINDRIHAVDERVSLKELELLEKVFLGVLEGLSEK

SEQ ID NO: 7596 - protein, 422 aa, Helicobacter pylori
  misc_feature (B) LOCATION 1...422
  hypothetical: YES
MKISLLGHGKTTLALGRFFKKNHNEVKFFDDKFPAFFKDSEGFLCYPSKDFNPNDSQLEIVSPGISFTHPLVMKAKHLMSEYDYIDSLFDHSFTPTMISISGTNGKTTTTEMLTTLLEDFKAVSGGNIGTPLIELFEKRSPLWVLETSSFSLHYTNKAYPLIYLLINVEADHLTWHCNFENYLNAKLKVLTLMPKTSLAILPLKFKEHPIVQNSQAQKIFFDKSEEVLECLKIPSNALFFKGAFLLDAALALLVYEQFLKIKNLKWQDYRENALKRLNAFKIGSHKMEEFRDKQGRLWVDDSKATNIDATLQALKTFKNQKIHLILGGDIKGVNLTPLFEEFKNYKISLYAIGSSASIIQALALEFNVSCQVCLKLEKAVQEIKSVLLQNEVALLSPSAASLDQFSSYKERGEKFKAFVLKD

SEQ ID NO: 7597 - protein, 422 aa, Helicobacter pylori; identical to SEQ ID NO: 7596
  misc_feature (B) LOCATION 1...422
  hypothetical: YES

SEQ ID NO: 7598 - protein, 426 aa, Helicobacter pylori
  misc_feature (B) LOCATION 1...426
  hypothetical: YES
RCVKMKISLLGHGKTTLALGRFFKKNHNEVKFFDDKFPAFFKDSEGFLCYPSKDFNPNDSQLEIVSPGISFTHPLVMKAKHLMSEYDYIDSLFDHSFTPTMISISGTNGKTTTTEMLTTLLEDFKAVSGGNIGTPLIELFEKRSPLWVLETSSFSLHYTNKAYPLIYLLINVEADHLTWHCNFENYLNAKLKVLTLMPKTSLAILPLKFKEHPIVQNSQAQKIFFDKSEEVLECLKIPSNALFFKGAFLLDAALALLVYEQFLKIKNLKWQDYRENALKRLNAFKIGSHKMEEFRDKQGRLWVDDSKATNIDATLQALKTFKNQKIHLILGGDIKGVNLTPLFEEFKNYKISLYAIGSSASIIQALALEFNVSCQVCLKLEKAVQEIKSVLLQNEVALLSPSAASLDQFSSYKERGEKFKAFVLKD

SEQ ID NO: 7599 - protein, 53 aa, Helicobacter pylori
  misc_feature (B) LOCATION 1...53
  hypothetical: YES
DNRIALVINLVHGGDGEDGKLASLLEFYRIASIGPRVEASVLTLYIIFNQTLR

SEQ ID NO: 7600 - protein, 78 aa, Helicobacter pylori
  misc_feature (B) LOCATION 1...78
  hypothetical: YES
KKILKNSITICLMARSSVAIFCHRNEVYLNEINPIPGSLANYLFDDFKTTLENLAQSLPKTPKIQVKNSYLLQIQKNK

SEQ ID NO: 7601 - protein, 99 aa, Helicobacter pylori
  misc_feature (B) LOCATION 1...99
  hypothetical: YES
LQSFLGSLIVEFCVLFGGASFEHEISIVSAIALKGVLKDRIKYFIFLDENHYFYLIEESNMHSKYFAQIKEKKLPPLILTHNGLLKNSFLGAKIIELPW

SEQ ID NO: 7602 - protein, 98 aa, Helicobacter pylori
  misc_feature (B) LOCATION 1...98
  hypothetical: YES
LDSAFEYSKEVLIEPFIQGVKEYNLAGCKIKKGFCFSYVEEPNKQEFLDFKQKYLDFSRTKAPKANLSNALEEQLKENFKKLYNDLFDGAIIRCDFLS

SEQ ID NO: 7603 - protein, 356 aa, Helicobacter pylori
  misc_feature (B) LOCATION 1...356
  hypothetical: YES
LQSFLGSLIVEFCVLFGGASFEHEISIVSAIALKGVLKDRIKYFIFLDENHYFYLIEESNMHSKYFAQIKEKKLPPLILTHNGLLKNSFLGAKIIELPLVINLVHGGDGEDGKLASLLEFYRIAFIGPRVEASVLSYNKYLTKLYAKDLGVKALDYVLLNEKNRANALDLIGFNFPFIVKPSNAGSSLGVNVVKEEKELIYALDSAFEYSKEVLIEPFIQGVKEYNLAGCKIKKGFCFSYVEEPNKQEFLDFKQKYLDFSRTKAPKANLSNALEEQLKENFKKLYNDLFDGAIIRCDFFVIENEVYLNEINPIPGSLANYLFDDFKTTLENLAQSLPKTPKIQVKNSYLLQIQKNK

SEQ ID NO: 7604 - protein, 353 aa, Helicobacter pylori
  misc_feature (B) LOCATION 1...353
  hypothetical: YES
MKFALTGGGTGGHLSIAKALAIELEKQGIEAIYLGSTYGQDKEWFENSPLFSERYFFNTQGVVNKSFFKKIRSLFLQAKAAFKAKEILKKHQITHTISVGGFSAGPASFASLLNKIPLYIHEQNAIKGSLNRYLSPKAKAVFSSYAFKDKGNHVLTSYPVQNAFFDHARTRTEIKHILFLGGSQGAKAINEFALLNAPKLTKQGIKITHICGPNSYEQVRFFYQELGLLDKIELFAFHNNITEVMHRADLCVSRAGASSVWELCANGLPTIFIPYPFASNNHQYYNVLEFEKENLCYVVPQNELLPKKLFEVIRKLNQKDDQGNKNLTTISAKLQQKIAKDGAKTIIETILSA

SEQ ID NO: 7605 - protein, 363 aa, Helicobacter pylori
  misc_feature (B) LOCATION 1...363
  hypothetical: YES
RKRTSLGVFSMKFALTGGGTGGHLSIAKALAIELEKQGIEAIYLGSTYGQDKEWFENSPLFSERYFFNTQGVVNKSFFKKIRSLFLQAKAAFKAKEILKKHQITHTISVGGFSAGPASFASLLNKIPLYIHEQNAIKGSLNRYLSPKAKAVFSSYAFKDKGNHVLTSYPVQNAFFDHARTRTEIKHILFLGGSQGAKAINEFALLNAPKLTKQGIKITHICGPNSYEQVRFFYQELGLLDKIELFAFHNNITEVMHRADLCVSRAGASSVWELCANGLPTIFIPYPFASNNHQYYNVLEFEKENLCYVVPQNELLPKKLFEVIRKLNQKDDQGNKNLTTISAKLQQKIAKDGAKTIIETILSA

SEQ ID NO: 7606 - protein, 286 aa, Helicobacter pylori
  misc_feature (B) LOCATION 1...286
  hypothetical: YES
LXPMKVIQVFLFSNPFCAIVPNTEPEHLEHYDHDLERFFFAYKYFLDHAQKRVIYKEDPFLKNYSKDAIVLEKKDIYNIQYILKDGEPYTSFELKNLGAFLVWGLGEHNATNASLAILSALDELNLEEIRNNXLNFKGIKKRFDILQKNNLILIDDYAHHPTEIGXTLKSARIYANLLNTQEKIIVIWQAHKYSRLMDNLEEFKKCFLEHCDRLIILPVYSASEVKRDIDLKAHFKHYNPTFIDRVRKKGDFLELLVNDNVVETIEKGFVIGFGAGDITYQLRGEM

SEQ ID NO: 7607 - protein, 449 aa, Helicobacter pylori
  misc_feature (B) LOCATION 1...449
  hypothetical: YES
MLETPKVLLKNLQDCKIHFIGIGGIGISGLAKYLKAQGAKISGSDIAISPSVKYLKALGVEINIPHDPKAINHQDVIIHSAIIKEDNTEIQRAKELEIPILSRKDALYSILKDKRVFSVCGAHGKSSITAMLSAICPAFGAIIGAHSKEFDSNVRESADMSLVFEADESDSSFLFSNPFCAIVPNTEPEHLEHYDHDLERFFFAYKYFLDHAQKRVIYKEDPFLKNYSKDAIVLEKKDIYNIQYILKDGEPYTSFELKNLGAFLVWGLGEHNATNASLAILSALDELNLEEIRNNLLNFKGIKKRFDILQKNDLILIDDYAHHPTEIGTTLKSARIYANLLNTQEKIIVIWQAHKYSRLMDNLEEFKKCFLEHCDRLIILPVYSASEVKRDIDLKAHFKHYNPTFIDRVRKKGDFLELLVNDNVVETIEKGFVIGFGAGDITYQLRGEM

SEQ ID NO: 7608 - protein, 455 aa, Helicobacter pylori
  misc_feature (B) LOCATION 1...455
  hypothetical: YES
KLTEKIMLETPKVLLKNLQDCKIHFIGIGGIGISGLAKYLKAQGAKISGSDIAISPSVKYLKALGVEINIPHDPKAINHQDVIIHSAIIKEDNTEIQRAKELEIPILSRKDALYSILKDKRVFSVCGAHGKSSITAMLSAICPAFGAIIGAHSKEFDSNVRESADMSLVFEADESDSSFLFSNPFCAIVPNTEPEHLEHYDHDLERFFFAYKYFLDHAQKRVIYKEDPFLKNYSKDAIVLEKKDIYNIQYILKDGEPYTSFELKNLGAFLVWGLGEHNATNASLAILSALDELNLEEIRNNLLNFKGIKKRFDILQKNDLILIDDYAHHPTEIGTTLKSARIYANLLNTQEKIIVIWQAHKYSRLMDNLEEFKKCFLEHCDRLIILPVYSASEVKRDIDLKAHFKHYNPTFIDRVRKKGDFLELLVNDNVVETIEKGFVIGFGAGDITYQLRGEM

SEQ ID NO: 7609 - protein, 62 aa, Helicobacter pylori
  misc_feature (B) LOCATION 1...62
  hypothetical: YES
IPAPPEATYDLVRKMRASILVLGPLLARFRECLVSLPGGCAIGARPVDLHLKAMQQLGLKSN

SEQ ID NO: 7610 - protein, 65 aa, Helicobacter pylori
  misc_feature (B) LOCATION 1...65
  hypothetical: YES
KRKRIELDFLEIVGQVPLKGEVEISGAKNSALPILAATLLSHQEVKIKSLPQVGDIKAMALLLHI

SEQ ID NO: 7611 - protein, 137 aa, Helicobacter pylori
  misc_feature (B) LOCATION 1...137
  hypothetical: YES
ARLYPCKAPKGLKGNDILFDKISVTGTENALMAASLAKGITRIINAAKEPEIAQLCAFLQSGGVEIEGVDSSELKIRGVESDALNLKDIQIIPDRIEAGTCLCVGAITSGQLKVGRVVPGRVQAIAGKLIEIGFPLD

SEQ ID NO: 7612 - protein, 279 aa, Helicobacter pylori
  misc_feature (B) LOCATION 1...279
  hypothetical: YES
LDFLEIVGQVPLKGEVEISGAKNSALPILAATLLSHQEVKIKSLPQVVDIKAMALLLQNLGAELEWLNPHTLQLSAKSLHHTEATYDLVRKMRASILVLGPLLARFKECLVSLPGGCAIGARPVDLHLKAMQQLGAEIKIEQGYIHAKAPKGLKGNDILFDKISVTGTENALMAASLAKGITRIINAAKEPEIAQLCAFLQSGGVEIEGVDSSELKIRGVESDALNLKDIQIIPDRIEAGTCLCVGAITSGQLKVGRVVPGRVQAIAGKLIEIGFPLDI

SEQ ID NO: 7613 - protein, 76 aa, Helicobacter pylori
  misc_feature (B) LOCATION 1...76
  hypothetical: YES
SLGMDNVDLNDMFNPNIALKFGNYYLNHLKKGFNHPLFVAYAYNAGPGFLRRWLESSKRFKGKNHFGPWLSMELMP

SEQ ID NO: 7614 - protein, 75 aa, Helicobacter pylori
  misc_feature (B) LOCATION 1...75
  hypothetical: YES
SLGMDNVDLNDMFNPNIALKFGNYYLNHLKKGFNHPLFVAYAYNAGPGFLRRWLESSKRFKGKNHFGPWLSMELM

SEQ ID NO: 7615 - protein, 115 aa, Helicobacter pylori
  misc_feature (B) LOCATION 1...115
  hypothetical: YES
MDNVDLNDMFNPNIALKFGNYYLNHLKKGFNHPLFVAYAYNAGPGFLRRWLESSKRFKGKNHFEPWLSMELMPYSETRMYGFRVMLNYLIYQEIFGNFIPIDAFLEQTLNSKDKP

SEQ ID NO: 7616 - protein, 101 aa, Helicobacter pylori
  misc_feature (B) LOCATION 1...101
  hypothetical: YES
LHTIELSSDDVFEAIKDQVREISSALRSVLEEVKPDLVRDIVQNGVVLTGGGALIKGLDKYLSDMVKLPVYVGDEPLLAVAKGTGEAIQDLDLLSRVGFSE

SEQ ID NO: 7617 - protein, 101 aa, Helicobacter pylori; identical to SEQ ID NO: 7616
  misc_feature (B) LOCATION 1...101
  hypothetical: YES

SEQ ID NO: 7618 - protein, 100 aa, Helicobacter pylori
  misc_feature (B) LOCATION 1...100
  hypothetical: YES
HTIELSSDDVFEAIKDQVREISSALRSVLEEVKPDLVRDIVQNGVVLTGGGALIKGLDKYLSDMVKLPVYVGDEPLLAVAKGTGEAIQDLDLLSRVGFSE

SEQ ID NO: 7619 - protein, 109 aa, Helicobacter pylori
  misc_feature (B) LOCATION 1...109
  hypothetical: YES
LTTASIFTPMQETLVGVLALGYADGLVRALGNRIQVAINNQLAPLIGKVCMDQCFVKLNDIEAKEGDEVILFGDKSTKANDASEIATLLNTIPYETISTLSKRLERVYV

SEQ ID NO: 7620 - protein, 128 aa, Helicobacter pylori
  misc_feature (B) LOCATION 1...128
  hypothetical: YES
CYQFKSANRSNQTSKKRRIIGYGEHFYTNEETLVGVLALGYADGLVRALGNRIQVAINNQLAPLIGKVCMDQCFVKLNDIEAKEGDEVILFGDKSTKANDASEIATLLNTIPYETISTLSKRLERVYV

SEQ ID NO: 7621 - protein, 127 aa, Helicobacter pylori
  misc_feature (B) LOCATION 1...127
  hypothetical: YES
YQFKSANRSNQTSKKRRIIGYGEHFYTNEETLVGVLALGYADGLVRALGNRIQVAINNQLAPLIGKVCMDQCFVKLNDIEAKEGDEVILFGDKSTKANDASEIATLLNTIPYETISTLSKRLERVYV

SEQ ID NO: 7622 - protein, 377 aa, Helicobacter pylori
  misc_feature (B) LOCATION 1...377
  hypothetical: YES
MLKRASFVEVNTHSLRHNFNAVKNIVPKDACVMAVVKANAYGAGAIKASEIFLQEGANYLGVATLDEALELRSHFSQTPILILGYSPNTNASMLIDNDLSAMVFSLEQAEVFSQMALKSQKRLKVHLKIDTGMHRLGLEPTFKSIETIKKIRALKGLEVEGIFTHLSNADSNIKTHAKNQMKVFNAFLEQLLDQKIEFQYRHAYNSAGILSLCNGNENRLLNLYRPGIMLYGFYPSNEMKESSQTILKNVISLKARIVQIKRVKKGEFIGYGEHFYTNEETLVGVLALGYADGLVRALGNRIQVAINNQLAPLIGKVCMDQCFVKLNDIEAKEGDEVILFGDKSTKANDASEIATLLNTIPYETISTLSKRLERVYV

SEQ ID NO: 7623 - protein, 365 aa, Helicobacter pylori
  misc_feature (B) LOCATION 1...365
  hypothetical: YES
QSLRHSGWREPVFHAGLRKSENPKSQNPQLQSDNKKLFYKIHCLVDNLSLENQQKLKETPVPLSAFASEDFLDISTPNLYTTSVEPSVIDKIHEAFLQLNIYAKTRFSKMVMCRLFLASLFPQYDKIIMFDADTLFLNDVSESFFIPLDSYYFGAAKDFSSPKSLKHFQTEREREPRQKFSLYEHYLKEKDMQIICENHYNVGFLIVNLKLWRADKLEEHLLNLTHQKGQCVFCPEQDLLTLACYQKVLQLPYIYNAHPFMANQKRFIPNQQEIIMLHFYFVGKPWILPTALYSKEWHEILLKTPFYAEYSVKFLKQMTECLSLQDKQKTFEFLAPLLNPKTLLEYVFFRLSKIFKRLKERFLNS

SEQ ID NO: 7624 - protein, 377 aa, Helicobacter pylori
  misc_feature (B) LOCATION 1...377
  hypothetical: YES
MSITIPIVIAFDNHYAIPAGVSLYSMLACAKSENPKSQNPQLQSDNKKLFYKIHCLVDNLSLENQQKLKETLVPFSAFASVDFLDISTPNLYTTSVEPSVIDKIHEAFLQLNIYAKTRFSKMVMCRLFLASLFPQYDKIIMFDADTLFLNDVSESFFIPLDSYYFGAAKDFSSPKSLKHFQTEREREPRQKFSLYEHYLKEKDMQIICENHYNVGFLIVNLKLWRADKLEEHLLNLTHQKGQCVFCPEQDLLTLACYQKVLQLPYIYNAHPFMANQKRFIPNQQEIIMLHFYFVGKPWILPTALYSKEWHEILLKTPFYAEYSVKFLKQMTECLSLQDKQKTFEFLAPLLNPKTLLEYVFFRLSKIFKRLKERFLNS

SEQ ID NO: 7625 - protein, 314 aa, Helicobacter pylori
  misc_feature (B) LOCATION 1...314
  hypothetical: YES
GKIKMLQRPKIVAELSANHNQDLNLAKESLHAIKESGADFVKLQTYTPSCMTLDSKEDPFIIQGTLWDKENLYGLYQKASTPLEWHAELFELAKKLDLGIFSSPFSSKALELLESLDCPMYKIASFEIVDLDLIEKAARTQKPIILSSGIATHAELQDAISLCRGVNNFDITLLKCVSAYPSKIEDAHLLSMVKLGETFGVKFGLSDHTIGSLCPILATTLGASMIEKHFILNKSLQTPDSAFSMDFNGFKSMVGAIKQSVLALGEEEPKINPKTLEERRFFARSLFVIKDIQKGEALTSDNIKALRPNLGVTP

SEQ ID NO: 7626 - protein, 340 aa, Helicobacter pylori
  misc_feature (B) LOCATION 1...340
  hypothetical: YES
MLQRPKIVAELSANHNQDLNLAKESLHAIKESGADFVKLQTYTPSCMTLDSKEDPFIIQGTLWDKENLYGLYQKASTPLEWHAELFELAKKLDLGIFSSPFSSKALELLESLDCPMYKIASFEIVDLDLIEKAARTQKPIILSSGIATHAELQDAISLCRGVNNFDITLLKCVSAYPSKIEDAHLLSMVKLGETFGVKFGLSDHTIGSLCPILATTLGASMIEKHFILNKSLQTPDSAFSMDFNGFKSMVGAIKQSVLALGEEEPKINPKTLEERRFFARSLFVIKDIQKGEALTSDNIKALRPNLGLHPKFYKEILGQKASKFLKANTPLSADDIERAL

SEQ ID NO: 7627 - protein, 90 aa, Helicobacter pylori
  misc_feature (B) LOCATION 1...90
  hypothetical: YES
VGLSGSTTTGRNVVFGGQVGIGGHLHVGEFTQIGGKSAVGKDLPPNTNFAGAIPAMEIHEWHHFLAHLRTNFRKQQKTSLLQKAKGFFKS

SEQ ID NO: 7628 - protein, 336 aa, Helicobacter pylori
  misc_feature (B) LOCATION 1...336
  hypothetical: YES
MKLSELLSAYSIETEFSNDFEVHALAELDKATPNDISYIDQVCYLKLLKDSKAGAVFIRKKESSKVPKSMQALIVDNPHLAFAKVSHAFKIPFFKNPQSVNEPKHFEKVTIMPNVVIGEGVEIGENSLIYPGVVIADGVKIGKNCILYPRVILYQNTILEDNVIIHAGSVIGGDGFGYAHTALGEHVKIEHVGIVRIQKNVEIGANTAIDRAVFGETLIKEGVKIDNLVQIGHNCVLGEHSIVVSQVGLSGSTTTGRNVVFGGQVGIGGHLHVGEFTQIGGKSAVGKDLPPNTNFAGAIPAMEIHEWHHFLAHLRTNFRKQQKTSLLQKAKGFFKS

SEQ ID NO: 7629 - protein, 132 aa, Helicobacter pylori
  misc_feature (B) LOCATION 1...132
  hypothetical: YES
MFYLINTGVPHLVGFVKNKGLLNSLNTLELRALRHEFNANINIAFIENKETIFLQTYERGVEDFTLACGTGMAAVFIAARLFHNTPKKATLIPKSNEFLELSLKNDGIFYKGVARYIGMSVLGMGVFKNGCF

SEQ ID NO: 7630 - protein, 273 aa, Helicobacter pylori
  misc_feature (B) LOCATION 1...273
  hypothetical: YES
MVFYKYSGSGNDFLITQSFKKKDFSNLAQQVCHRHEGFGADGLVVVLPSKDYDYEWDFYNSDGSKAGMCGNASRCVGLFAYQHAIAPKEHVFLAGKREISIRIEEPNIVESNLGNYQILDTIPNLRCKKFFTNNSVLENIPMFYLINTGVPHLVGFVKNKGLLNSLNTLELRALRHEFNANINIAFIENKETIFLQTYERGVEDFTLACGTGMAAVFIAARLFHNTPKKATLIPKSNEFLELSLKNDGIFYKGVARYIGMSVLGMGVFKNGCF

SEQ ID NO: 7631 - protein, 273 aa, Helicobacter pylori
  misc_feature (B) LOCATION 1...273
  hypothetical: YES
WCFTNIQEIGNDFLIPQSFKKKDFSNLAQQVCHRHEGFGADGLVVVLPSKDYDYEWDFYNSDGSKAGMCGNASRCVGLFAYQHAIAPKEHVFLAGKREISIRIEEPNIVESNLGNYQILDTIPNLRCKKFFTNNSVLENIPMFYLINTGVPHLVGFVKNKGLLNSLNTLELRALRHEFNANINIAFIENKETIFLQTYERGVEDFTLACGTGMAAVFIAARLFHNTPKKATLIPKSNEFLELSLKNDGIFYKGVARYIGMSVLGMGVFKNGCF

SEQ ID NO: 7632 - protein, 56 aa, Helicobacter pylori
  misc_feature (B) LOCATION 1...56
  hypothetical: YES
IKNSGMKIGVFDSGVGGFSVLKSLLKARLFDEIIYYGDSARVPYGTKTPPRSSNLA

SEQ ID NO: 7633 - protein, 169 aa, Helicobacter pylori
  misc_feature (B) LOCATION 1...169
  hypothetical: YES
VACNTASALALEEMQKYSKIPIVGVIEPSILAIKRQVEDKNAPILVLGTKATIQSNAYDNALKQQGYLNISHLATSLFVPLIEESILEGELLETCMHYYFTPLEILPEVIILGCTHFPLIAQKIEGYFMGHFALPTPPLLIHSGDAIVEYLQQKYALKNNACTFPKVEF

SEQ ID NO: 7634 - protein, 219 aa, Helicobacter pylori
  misc_feature (B) LOCATION 1...219
  hypothetical: YES
SALWHKDPTTIKQFGLEALDFFKPHEIELLIVACNTASALALEEMQKYSKIPIVGVIEPSILAIKRQVEDKNAPILVLGTKATIQSNAYDNALKQQGYLNISHLATSLFVPLIEESILEGELLETCMHYYFTPLEILPEVIILGCTHFPLIAQKIEGYFMGHFALPTPPLLIHSGDAIVEYLQQKYALKNNACTFPKVEFHASGDVIWLERQAKEWLKL

SEQ ID NO: 7635 - protein, 255 aa, Helicobacter pylori
  misc_feature (B) LOCATION 1...255
  hypothetical: YES
MKIGVFDSGVGGFSVLKSLLKARLFDEIIYYGDSARVPYGTKDPTTIKQFGLEALDFFKPHEIELLIVACNTASALALEEMQKYSKIPIVGVIEPSILAIKRQVEDKNAPILVLGTKATIQSNAYDNALKQQGYLNISHLATSLFVPLIEESILEGELLETCMHYYFTPLEILPEVIILGCTHFPLIAQKIEGYFMGHFALPTPPLLIHSGDAIVEYLQQKYALKNNACTFPKVEFHASGDVIWLERQAKEWLKL

SEQ ID NO: 7636 - protein, 162 aa, Helicobacter pylori
  misc_feature (B) LOCATION 1...162
  hypothetical: YES
MGNELMQKIGIYPGTFDPVTNGHIDIIHRSSELFEKLIVAVAHSSAKNPMFSLDERLKMMQLATKSFKNVECVAFEGLLADLAKEYHCKVLVRGLRVVSDFEYELQMGYANKSLNHELETLYFMPTLQNAFISSSIVRSIIAHKGDASHLVPKEIYPFISKV

SEQ ID NO: 7637 - protein, 86 aa, Helicobacter pylori
  misc_feature (B) LOCATION 1...86
  hypothetical: YES
MYSLLLDLNKKTALLGTRGFFIDDKHIKEKGLTTPTLLELYSDLEEAIRLKCEYFIMEVSSHAIVQNASLGLISLLKFSPISQAII

SEQ ID NO: 7638 - protein, 432 aa, Helicobacter pylori
  misc_feature (B) LOCATION 1...432
  hypothetical: YES
RMKLKKTLTYQHHAYSFLSDNTNEVLENPKEILFVKTPLNEKYAPLIAEKNLAILDFNELKNYFDFKIKIVGITGTNGKTTTASLMYSLLLDLNKKTALLGTRGFFIDDKHIKEKGLTTPTLLELYSDLEEAIRLKCEYFIMEVSSHAIVQKRIAGLDFALKILTNITSDHLDFHQNIENYRDAKNSFFKDEGLKVINRDETNALFNPINARTYALDKKAHLNVQAFSLNPSISASLCYQHDLRDPNLKETALIHSPLLGRYNLYNILAGVLGVKLLTQLPLETIAPLLENFYGVKGRLEIVHSKPLVVVDFAHTTDGMQQVFESFKNQKITALFGAGGDRDKTKRPKMGAIASCYAHQIILTSDNPRSENEEDIIKDILKGINNSSKVIVEKDRKKAILNALENLKDDEVLLILGKGDENIQIFKDKTIFF

SEQ ID NO: 7639 - protein, 447 aa, Helicobacter pylori
  misc_feature (B) LOCATION 1...447
  hypothetical: YES
MKLKKTLTYQHHAYSFLSDNTNEVLENPKEILFVKTPLNEKYAPLIAEKNLAILDFNELKNYFDFKIKIVGITGTNGKTTTASLMYSLLLDLNKKTALLGTRGFFIDDKHIKEKGLTTPTLLELYSDLEEAIRLKCEYFIMEVSSHAIVQKRIAGLDFALKILTNITSDHLDFHQNIENYRDAKNSFFKDEGLKVINRDETNALFNPINARTYALDKKAHLNVQAFSLNPSISASLCYQHDLRDPNLKETALIHSPLLGRYNLYNILAGVLGVKLLTQLPLETIAPLLENFYGVKGRLEIVHSKPLVVVDFAHTTDGMQQVFESFKNQKITALFGAGGDRDKTKRPKMGAIASCYAHQIILTSDNPRSENEEDIIKDILKGINNSSKVIVEKDRKKAILNALENLKDDEVLLILGKGDENIQIFKDKTIFFSDQEVVKDYYLNLKQG

SEQ ID NO: 7640 - protein, 49 aa, Helicobacter pylori
  misc_feature (B) LOCATION 1...49
  hypothetical: YES
ALSATKAAVEEGIVIDDGAALIRAAQKVHLNLHDDEKVGYEIIMRAIKA

SEQ ID NO: 7641 - protein, 98 aa, Helicobacter pylori
  misc_feature (B) LOCATION 1...98
  hypothetical: YES
GMDKAAEAIINELKKASKKVGGKEEITQVATISANSDHNIGKLIADAMEKVGKDGVITVEEAKGIEDELDVVEGMQFDRVYLSPYFVTNAEKMTAQLG

SEQ ID NO: 7642 - protein, 97 aa, Helicobacter pylori
  misc_feature (B) LOCATION 1...97
  hypothetical: YES
MDKAAEAIINELKKASKKVGGKEEITQVATISANSDHNIGKLIADAMEKVGKDGVITVEEAKGIEDELDVVEGMQFDRVYLSPYFVTNAEKMTAQLG

SEQ ID NO: 7643 - protein, 135 aa, Helicobacter pylori
  misc_feature (B) LOCATION 1...135
  hypothetical: YES
VVNKLRGVLNIAAVKAPGFGDRRKEMLKDIAILTGGQVISEELGLSLENAEVEFLGKAGRIVIDKDNTTIVDGKGHSDDVKDRVAQIKTQIADTTSDYDKEKLQERLAKLSGGVAVIKVDAASEVEMKEKKDRVD

SEQ ID NO: 7644 - protein, 134 aa, Helicobacter pylori
  misc_feature (B) LOCATION 1...134
  hypothetical: YES
VNKLRGVLNIAAVKAPGFGDRRKEMLKDIAILTGGQVISEELGLSLENAEVEFLGKAGRIVIDKDNTTIVDGKGHSDDVKDRVAQIKTQIADTTSDYDKEKLQERLAKLSGGVAVIKVDAASEVEMKEKKDRVD

SEQ ID NO: 7645 - protein, 546 aa, Helicobacter pylori
  misc_feature (B) LOCATION 1...546
  hypothetical: YES
MAKEIKFSDSARNLLFEGVRQLHDAVKVTMGPRGRNVLIQKSYGAPSITKDGVSVAKEIELSCPVANMGAQLVKEVASKTADAAGDGTTTATVLAYSIFKEGLRNITAGANPIEVKRGMDKAAEAIINELKKASKKVGGKEEITQVATISANSDHNIGKLIADAMEKVGKDGVITVEEAKGIEDELDVVEGMQFDRGYLSPYFVTNAEKMTAQLDNAYILLTDKKISSMKDILPLLEKTMKEGKPLLIIAEDIEGEALTTLVVNKLRGVLNIAAVKAPGFGDRRKEMLKDIAILTGGQVISEELGLSLENAEVEFLGKAGRIVIDKDNTTIVDGKGHSDDVKDRVAQIKTQIASTTSDYDKEKLQERLAKLSGGVAVIKVGAASEVEMKEKKDRVDDALSATKAAVEEGIVIGGGAALIRAAQKVHLNLHDDEKVGYEIIMRAIKAPLAQIAINAGYDGGVVVNEVQKHEGHFGFNASNGKYVDMFKEGIIDPLKVERIALQNAVSVSSLLLTTEATVHEIKEEKAAPAMPDMGGMGGMGGMGGMM

SEQ ID NO: 7646 - protein, 257 aa, Helicobacter pylori
  misc_feature (B) LOCATION 1...257
  hypothetical: YES
GGMREGQSQSKIPFKINGTRGKIMDKFNKDLNEVLSHALDLALDFNHVLCTTEHVLLAILEHGIGIRIFNTLEEDGYHKMEQILKDYLQQYIPLKNDPTKIPDRSPVLARVFKKMYASYLDSVGVEELLIFILEYDDCYASKLLDSFGITRSYFKSALLDFDNPNDINDNDINNEEAPKSTPLKKYTKNLSALAQNNALDPVIGREEEILRVIEILGRRKKNNPLLIGEAGVGKTSIAEALALKIAQKEVPELFARI

SEQ ID NO: 7647 - protein, 507 aa, Helicobacter pylori
  misc_feature (B) LOCATION 1...507
  hypothetical: YES
KSLKKKCRSFLQEYEVYSLDLALMVAGAKYRGDFEKRLKKTLKEIQQNGRIILFIDEIHTLLGAGSSNAGSLDAANILKPVLTDGSLKCLGATTFEEYRSVFEKDKAFNRRFSIVNVEEPSKEACYLILKNIAPLYEEHHQVRYNESVFKACVDLTSYYMHDKFLPDKAIELLDEVGSRKKINPKKGKKISVDDVQETLALKLKIPKMRLNSDKKALLRNLEKSLKNKIFAQTEAINLVSNAIKIQHCGLSAKNKPVGSFLFVGPSGVGKTELAKELALNLNLHFERFDMSEYKEAHSVAKLIGSPSGYVGFEQGGLLVNAIKKHPHCLLLLDEIEKAHPNVYDLLLQVMDNATLSDNLGNKASFKHVILIMTSNVGSKDKDTLGFFSTKNAKYDRAVKELLTPELRSRIDAIVPFNALSLEDFERIVSVELDGLKALAIEQGVILKFHKEVVKCIAQKSYQRSFGAREIKKIIQREINPQLSDIVLKQSLKKPTRSLRMKSTFHKV

SEQ ID NO: 7648 - protein, 506 aa, Helicobacter pylori
  misc_feature (B) LOCATION 1...506
  hypothetical: YES
KSLKKKCRSFLQEYEVYSLDLALMVAGAKYRGDFEKRLKKTLKEIQQNGRIILFIDEIHTLLGAGSSNAGSLDAANILKPVLTDGSLKCLGATTFEEYRSVFEKDKAFNRRFSIVNVEEPSKEACYLILKNIAPLYEEHHQVRYNESVFKACVDLTSYYMHDKFLPDKAIELLDEVGSRKKINPKKGKKISVDDVQETLALKLKIPKMRLNSDKKALLRNLEKSLKNKIFAQTEAINLVSNAIKIQHCGLSAKNKPVGSFLFVGPSGVGKTELAKELALNLNLHFERFDMSEYKEAHSVAKLIGSPSGYVGFEQGGLLVNAIKKHPHCLLLLDEIEKAHPNVYDLLLQVMDNATLSDNLGNKASFKHVILIMTSNVGSKDKDTLGFFSTKNAKYDRAVKELLTPELRSRIDAIVPFNALSLEDFERIVSVELDGLKALAIEQGVILKFHKEVVKCIAQKSYQRSFGAREIKKIIQREINPQLSDIVLKQSLKKPTRSLRMKSTFHK

SEQ ID NO: 7649 - protein, 713 aa, Helicobacter pylori
  misc_feature (B) LOCATION 1...713
  hypothetical: YES
MDKFNKDLNEVLSHALDLALDFNHVLCTTEHVLLAILEHGIGIRIFNTLEEDGYHKMEQILKDYLQQYIPLKNDPTKIPDRSPVLARVFKKMYASYLDSVGVEELLIFILEYDDCYASKLLDSFGITRSYFKSALLDFDNPNDINDNDINNEEAPKSTPLKKYTKNLSALAQNNALDPVIGREEEILRVIEILGRRKKNNPLLIGEAGVGKTSIAEALALKIAQKEVPEFLQEYEVYSLDLALMVAGAKYRGDFEKRLKKTLKEIQQNGRIILFIDEIHTLLGAGSSNAGSLDAANILKPVLTDGSLKCLGATTFEEYRSVFEKDKAFNRRFSIVNVEEPSKEACYLILKNIAPLYEEHHQVRYNESVFKACVDLTSYYMHDKFLPDKAIELLDEVGSRKKINPKKGKKISVDDVQETLALKLKIPKMRLNSDKKALLRNLEKSLKNKIFAQTEAINLVSNAIKIQHCGLSAKNKPVGSFLFVGPSGVGKTELAKELALNLNLHFERFDMSEYKEAHSVAKLIGSPSGYVGFEQGGLLVNAIKKHPHCLLLLDEIEKAHPNVYDLLLQVMDNATLSDNLGNKASFKHVILIMTSNVGSKDKDTLGFFSTKNAKYDRAVKELLTPELRSRIDAIVPFNALSLEDFERIVSVELDKLKALALEQGVILKFHKEVVKCIAQKSYQTTFGAREIKKIIQREINPQLSDIVLKQSLKK

SEQ ID NO: 7650 - protein, 742 aa, Helicobacter pylori
  misc_feature (B) LOCATION 1...742
  hypothetical: YES
MDKFNKDLNEVLSHALDLALDFNHVLCTTEHVLLAILEHGIGIRIFNTLEEDGYHKMEQILKDYLQQYIPLKNDPTKIPDRSPVLARVFKKMYASYLDSVGVEELLIFILEYDDCYASKLLDSFGITRSYFKSALLDFDNPNDINDNDINNEEAPKSTPLKKYTKNLSALAQNNALDPVIGREEEILRVIEILGRRKKNNPLLIGEAGVGKTSIAEALALKIAQKEVPEFLQEYEVYSLDLALMVAGAKYRGDFEKRLKKTLKEIQQNGRIILFIDEIHTLLGAGSSNAGSLDAANILKPVLTDGSLKCLGATTFEEYRSVFEKDKAFNRRFSIVNVEEPSKEACYLILKNIAPLYEEHHQVRYNESVFKACVDLTSYYMHDKFLPDKAIELLDEVGSRKKINPKKGKKISVDDVQETLALKLKIPKMRLNSDKKALLRNLEKSLKNKIFAQTEAINLVSNAIKIQHCGLSAKNKPVGSFLFVGPSGVGKTELAKELALNLNLHFERFDMSEYKEAHSVAKLIGSPSGYVGFEQGGLLVNAIKKHPHCLLLLDEIEKAHPNVYDLLLQVMDNATLSDNLGNKASFKHVILIMTSNVGSKDKDTLGFFSTKNAKYDRAVKELLTPELRSRIDAIVPFNALSLEDFERIVSVELDKLKALALEQGVILKFHKEVVKCIAQKSYQTTLGAREIKKIIHNEIKTQLSDILLLQSFKKPCKIACLLEKNQLVLKEIKRAQKVKENDF

SEQ ID NO: 7651 - protein, 83 aa, Helicobacter pylori
  misc_feature (B) LOCATION 1...83
  hypothetical: YES
RMGKVIGIDLGTTNSAMAVYEGNEAKIIANKEGKNTTPSIVAFTDKGEILVGESAKRQAVTNPEKTIYSIKRIMGLMFNEDNG

SEQ ID NO: 7652 - protein, 347 aa, Helicobacter pylori
  misc_feature (B) LOCATION 1...347
  hypothetical: YES
NETGIEIKNDVMALQRLKEAAENAKKELSSAMETEINLPFITADATGPKHLVKKLTRAKFESLTEDLVEETISKIESVIKDAGLTKNEISEVVMVGGSTRIPKVQERVKAFINKELNKSVNPDEVVAVGASIQGGVLKGDVKDVLLLDVTPLSLGIETLGGVMTKVIDRGTTIPAKKSQVFSTAEDNQPAVSIMVLQGERELARDNKSLGKFDLQGIAPAPRGMPQIEVTFDIDANGILTVSAQDKNTGKSQEIKISGSSGLSDSEIEKMVKDAELHKEEDARKKEVIEARNHADSLAHQTQKSLDEHKTNLNENDANEIQNAINALKDCIKNDNATKRSLKTKPKR

SEQ ID NO: 7653 - protein, 346 aa, Helicobacter pylori
  misc_feature (B) LOCATION 1...346
  hypothetical: YES
ETGIEIKNDVMALQRLKEAAENAKKELSSAMETEINLPFITADATGPKHLVKKLTRAKFESLTEDLVEETISKIESVIKDAGLTKNEISEVVMVGGSTRIPKVQERVKAFINKELNKSVNPDEVVAVGASIQGGVLKGDVKDVLLLDVTPLSLGIETLGGVMTKVIDRGTTIPAKKSQVFSTAEDNQPAVSIMVLQGERELARDNKSLGKFDLQGIAPAPRGMPQIEVTFDIDANGILTVSAQDKNTGKSQEIKISGSSGLSDSEIEKMVKDAELHKEEDARKKEVIEARNHADSLAHQTQKSLDEHKTNLNENDANEIQNAINALKDCIKNDNATKRSLKTKPKR

SEQ ID NO: 7654 - protein, 586 aa, Helicobacter pylori
  misc_feature (B) LOCATION 1...586
  hypothetical: YES
MGKVIGIDLGTTNSAMAVYEGNEAKIIANKEGKNTTPSIVAFTDKGEILVGESAKRQAVTNPEKTIYSIKRIMGLMFNEDKAKEAEKRLPYKIVDRNGACAIEISGKIYTPQEISAKILMKLKEDAESYLGESVTEAVITVPAYFNDSQRKATKEAGTIAGLNVLRIINEPTSAALAYGLDKKESEKIMVYDLGGGTFDVTVLETGDNVVEVLATGGDAFLGGDDFDNRVIDFLAAEFKNETGIEIKNDVMALQRLKEAAENAKKELSSAMETEINLPFITADATGPKHLVKKLTRAKFESLTEDLVEETISKIESVIKDAGLTKNEISEVVMVGGSTRIPKVQERVKAFINKELNKSVNPDEVVAVGASIQGGVLKGDVKDVLLLDVTPLSLGIETLGGVMTKVIDRGTTIPAKKSQVFSTAEDNQPAVSIMVLQGERELARDNKSLGKFDLQGIAPAPRGMPQIEVTFDIDANGILTVSAQDKNTGKSQEIKISGSSGLSDSEIEKMVKDAELHKEEDARKKEVIEARNHADSLAHQTQKSLDEHKTNLNENDANEIQNAINALKDCIKNDNATKRSLKTKPKR

SEQ ID NO: 7655 - protein, 191 aa, Helicobacter pylori
  misc_feature (B) LOCATION 1...191
  hypothetical: YES
MKDEHNQEHDHLSPKEPESYQKAYACKEQQGEEKQEASEKEGEIKEDFELKYQEMREQYLRVHADFENVKKRLERDKSMALEYAYEKIALDLLPVIDALLGAHKSAVEVDKESALTKGLELTMEKLHEVLARHGIEGIECLEEFDPNFHNAIMQVKSEEKENGKIVQVLQQGYKYKGRVLRPAMVSIAKND

SEQ ID NO: 7656 - protein, 92 aa, Helicobacter pylori
  misc_feature (B) LOCATION 1...92
  hypothetical: YES
IVMLSSNIVGIPFENVQKKALERGINITLDEKAKELIAEAGFDRFYGARPLKRALYEMVEDKLAELILEDKIKENDSVAFVVENNEIVPKIK

SEQ ID NO: 7657 - protein, 98 aa, Helicobacter pylori
  misc_feature (B) LOCATION 1...98
  hypothetical: YES
RALKLSSRYITDRFLPDKAIDLIDEGAAQLKMQMESEPAKLSSVKRSIQRLEMEKQALEMENKESNHKRMQEILKELSDLKEGKIQLEAQFENRKRSV

SEQ ID NO: 7658 - protein, 236 aa, Helicobacter pylori
  misc_feature (B) LOCATION 1...236
  hypothetical: YES
EIAEIVSQWTHIPFQKMFQSEKNRVLNIESELQKRVVGQEKALKAIAKAIKRNKAGLSDSNKPIGSFLFLGPTGVGKTESAKALAQFLFDSDKNLIRIDMSEYMEKHAISRLIGAAPGYVGYEEGGQLTEAVRRKPYSVVLLDEVEKAHPDVFNFLLQVFDEGHLTDSKGVRVDFKNTILILTSNVASGALLEEDLSEADKQKAIKESLRQFFKPEFLNRLDEIISFNALDSHAII

SEQ ID NO: 7659 - protein, 235 aa, Helicobacter pylori
  misc_feature (B) LOCATION 1...235
  hypothetical: YES
IAEIVSQWTHIPFQKMFQSEKNRVLNIESELQKRVVGQEKALKAIAKAIKRNKAGLSDSNKPIGSFLFLGPTGVGKTESAKALAQFLFDSDKNLIRIDMSEYMEKHAISRLIGAAPGYVGYEEGGQLTEAVRRKPYSVVLLDEVEKAHPDVFNFLLQVFDEGHLTDSKGVRVDFKNTILILTSNVASGALLEEDLSEADKQKAIKESLRQFFKPEFLNRLDEIISFNALDSHAII

SEQ ID NO: 7660 - protein, 856 aa, Helicobacter pylori
  misc_feature (B) LOCATION 1...856
  hypothetical: YES
MNLFEKMTDQLHETLDSAIALALHHKNAEVTPMHMLFAMLNNSQGILIQALQKMPVDIEALKLSVQSELNKFAKVSQISKQNIQLNQALIQSLENAQGLMAKRGDSFIATDAYLLANMNLFESVLKPYLDTKELQKTLESLRKGRTIQDKNDDSNLESLEKFGIDLTQKALENKLDPVIGRDEEIIRMMQILIRKTKNNPILLGEPGVGKTAVVEGLAQRIVNKEVPKTLLNKRVVALDLSLLVAGAKYRGEFEERLKKVIEEVKKSANVILFIDEIHTIVGAGASEGGMDAANILKPALARGELHTIGATTLKEYRKYFEKDMALQRRFQPILLNEPSINEALQILRGLKETLETHHNITINDSALIASAKLSSRYITDRFLPDKAIDLIDEGAAQLKMQMESEPAKLSSVKRSIQRLEMEKQALEMENKESNHKRMQEILKELSDLKEEKIQLEAQFENEKEVFKEISRLKMEMEGLKKEAERFKRNGDYQQAAEIEYSKIPEKEKKEKELQHKWETMQQNGALLQNALTENNIAEIVSQWTHIPVQKMLQSEKNRVLNIESELQKRVVGQEKALKAIAKAIKRNKAGLSDSNKPIGSFLFLGPTGVGKTESAKALAQFLFDSDKNLIRIDMSEYMEKHAISRLIGAAPGYVGYEEGGQLTEAVRRKPYSVVLLDEVEKAHPDVFNLLLQVLDEGHLTDSKGVRVDFKNTILILTSNVASGALLEEDLSEADKQKAIKESLRQFFKPEFLNRLDEIISFNALDSHAIINIVGILFENVQKKALERGINITLDEKAKELIAEAGFDRFYGARPLKRALYEMVEDKLAELILEDKIKENDSVAFVVENNEIVPKIK

SEQ ID NO: 7661 - protein, 58 aa, Helicobacter pylori
  misc_feature (B) LOCATION 1...58
  hypothetical: YES
VELSYYEILEVEKHSNQETIKKSYRKLALKYHPDRNAGDKEAEEKFKLINEALWGARR

SEQ ID NO: 7662 - protein, 64 aa, Helicobacter pylori
  misc_feature (B) LOCATION 1...64
  hypothetical: YES
NTTRTETPAIKKPKKNSSSSMKPYGVLGDEKKRALYDRYGKKGLNQAGTSQSDFSDFFEDLGSF

SEQ ID NO: 7663 - protein, 69 aa, Helicobacter pylori
  misc_feature (B) LOCATION 1...69
  hypothetical: YES
NKRFDAIFGAIVELSYYEILEVEKHSNQETIKKSYRKLALKYHPDRNAGDKEAEEKFKLINEALWGARR

SEQ ID NO: 7664 - protein, 275 aa, Helicobacter pylori
  misc_feature (B) LOCATION 1...275
  hypothetical: YES
EDAFGFGARGSKRQKSSIAPDYLQMIELSFKEAVFGCKKTIKAQYQSVCESCDGTGAKDKALENCKQCNGQGQVFMRQGFMSFAQTCGACQGKGKIIKTPCQACKGKTYILKDEEIDAIIPEGIDDQNRMVLKNKGNEYEKGKRGDLYLEARVKEDEHFKREGCDLFIKAPVFFTTIALGHPIKVPSLRGDELELKIPRNAKDRQAFAFRNEGVKHPESSYRGSLIVELQVIYPKSLNKEQQGLLEKLHASFGYEGEPHKSVLETCVSKIKDWFK

SEQ ID NO: 7665 - protein, 274 aa, Helicobacter pylori
  misc_feature (B) LOCATION 1...274
  hypothetical: YES
DAFGFGARGSKRQKSSIAPDYLQMIELSFKEAVFGCKKTIKAQYQSVCESCDGTGAKDKALENCKQCNGQGQVFMRQGFMSFAQTCGACQGKGKIIKTPCQACKGKTYILKDEEIDAIIPEGIDDQNRMVLKNKGNEYEKGKRGDLYLEARVKEDEHFKREGCDLFIKAPVFFTTIALGHPIKVPSLRGDELELKIPRNAKDRQAFAFRNEGVKHPESSYRGSLIVELQVIYPKSLNKEQQGLLEKLHASFGYEGEPHKSVLETCVSKIKDWFK

SEQ ID NO: 7666 - protein, 369 aa, Helicobacter pylori
  misc_feature (B) LOCATION 1...369
  hypothetical: YES
VELSYYEILEVEKHSNQETIKKSYRKLALKYHPDRNAGDKEAEEKFKLINEAYGVLGDEKKRALYDRYGKKGLNQAGTSQSDFSDFFEDLGSFFEDAFGFGARGSKRQKSSIAPDYLQMIELSFKEAVFGCKKTIKAQYQSVCESCDGTGAKDKALENCKQCNGQGQVFMRQGFMSFAQTCGACQGKGKIIKTPCQACKGKTYILKDEEIDAIIPEGIDDQNRMVLKNKGNEYEKGKRGDLYLEARVKEDEHFKREGCDLFIKAPVFFTTIALGHTIKVPSLRGDELELKIPRNAKDRQAFAFRNEGVKHPESSYRGSLIVELQVIYPKSLNKEQQGLLEKLHASFGYEGEPHKSVLETCVSKIKDWFK

SEQ ID NO: 7667 - protein, 77 aa, Helicobacter pylori
  misc_feature (B) LOCATION 1...77
  hypothetical: YES
VPALEKLKNRFNERFKICPKDKETLWLETIQNLVASEFFELEDAINFGQELENANPNYRQKIANATGLALKNKKEKG

SEQ ID NO: 7668 - protein, 123 aa, Helicobacter pylori
  misc_feature (B) LOCATION 1...123
  hypothetical: YES
SSLYACCLCYWWGLLGGLTRPPLKQNIPNKSLSLKNLNEQIKNLQSVPALEKLKNRFNERFKICPKDKETLWLETIQNLVASEFFELEDAINFGQELENANPNYRQKIANATGLALKNKKEKG

SEQ ID NO: 7669 - protein, 135 aa, Helicobacter pylori
  misc_feature (B) LOCATION 1...135
  hypothetical: YES
MGNLTYYAYMYLILFVCLLPVLLVGLAWRLTRPPLKQNIPNKSLSLENLNEQIKNLQSVPALEKLKNRFNERFKICPKDKETLWLETIQNLVASEFFELEDAINFGQELENANPNYRQKIANATGLALKNKKEKG

SEQ ID NO: 7670 - protein, 79 aa, Helicobacter pylori
  misc_feature (B) LOCATION 1...79
  hypothetical: YES
IYMIGDNRDNSSDSRFWGSVAYKNIVGSPWFVYFSLSLKNSLEVDAENNPKKRYLVRWERMFKSVEGLEKIIKKEKATH

SEQ ID NO: 7671 - protein, 132 aa, Helicobacter pylori
  misc_feature (B) LOCATION 1...132
  hypothetical: YES
RGNRPKRGEVVVFIPPHEKKSYYVKRNFAIGGDEVLFTNEGFYLHPFESGNDKDYISKHYPNALTKEFMGKIFVLNPYKSKHPGIHYQKDNETFHLMEQLATQGAEANISMQLIQMEGDKVFYKKINHDEFT

SEQ ID NO: 7672 - protein, 200 aa, Helicobacter pylori
  misc_feature (B) LOCATION 1...200
  hypothetical: YES
VVVFIPPHEKKSYYVKRNFAIGGDEVLFTNEGFYLHPFESGNDKDYISKHYPNALTKEFMGKIFVLNPYKSKHPGIHYQKDNETFHLMEQLATQGAEANISMQLIQMEGEKVFYKKINHDEFFMIGDNRDNSSDSRFWGSVAYKNIVGSPWFVYFSLSLKNSLEVDAENNPKKRYLVRWERMFKSVEGLEKIIKKEKATH

SEQ ID NO: 7673 - protein, 162 aa, Helicobacter pylori
  misc_feature (B) LOCATION 1...162
  hypothetical: YES
MKPIKTYDIKEEELAKTAYATIKTNKGNITLELFYKDAPQAVSNFVTLAKEGFYNGLNFHRVIAGFVAQGGCPYGTGTGGPEHRIKCEVAHNPNKHQRGSISMAHAGRDTGGSQFFLCFVDLPHLDGEHTVFGKITSAESLSVLDKIKQGDIIESVVFSPSL

SEQ ID NO: 7674 - protein, 180 aa, Helicobacter pylori
  misc_feature (B) LOCATION 1...180
  hypothetical: YES
FIAIIEHLNDKSLSQRFMMKPIKTYDIKEEELAKTAYATIKTNKGNITLELFYKDAPQAVSNFVTLAKEGFYNGLNFHRVIAGFVAQGGCPYGTGTGGPEHRIKCEVAHNPNKHQRGSISMAHAGRDTGGSQFFLCFVDLPHLDGEHTVFGKITSAESLSVLDKIKQGDIIESVVFSPSL

SEQ ID NO: 7675 - protein, 178 aa, Helicobacter pylori
  misc_feature (B) LOCATION 1...178
  hypothetical: YES
MLEGVIRESITKANAKALKKDGYLIANIYGKGVENVNCAFKLNPFIKYLKEKKHLIFPVKLGDKTFEVVVQEYQKNPVTNELIHVDLLAVTKGVKSKFKVPVKHQGTPVGLKNKGILMLSKKRISVECAPEHLPDHYLVDVAPLDVNESILVRDLEKHENVKILDHDSIAVIGVIKAK

SEQ ID NO: 7676 - protein, 181 aa, Helicobacter pylori
  misc_feature (B) LOCATION 1...181
  hypothetical: YES
RIDMLEGVIRESITKANAKALKKDGYLIANIYGKGVENVNCAFKLNPFIKYLKEKKHLIFPVKLGDKTFEVVVQEYQKNPVTNELIHVDLLAVTKGVKSKFKVPVKHQGTPVGLKNKGILMLSKKRISVECAPEHLPDHYLVDVAPLDVNESILVRDLEKHENVKILDHDSIAVIGVIKAK

SEQ ID NO: 7677 - protein, 185 aa, Helicobacter pylori
  misc_feature (B) LOCATION 1...185
  hypothetical: YES
MQNHDLESIKQAALIEYEVREQGSSDVLDSNISKEPLEFIIGANQIIVGLEKAVLKAQIGEWEEIVIAPEEAYGVYESGYLQEVPRDQFEGIELEKGMSVFGQTEDNQTIQATIKDFSNTHVMVDYNHPLAGKTLAFRFKVLGFREVSEEEILASHHDSGTGCCGGHGGHGGKKGGGCGCSCSHG

SEQ ID NO: 7678 - protein, 192 aa, Helicobacter pylori
  misc_feature (B) LOCATION 1...192
  hypothetical: YES
KTRRNTTMQNHDLESIKQAALIEYEVREQGSSDVLDSNISKEPLEFIIGANQIIVGLEKAVLKAQIGEWEEIVIAPEEAYGVYESGYLQEVPRDQFEGIELEKGMSVFGQTEDNQTIQATIKDFSNTHVMVDYNHPLAGKTLAFRFKVLGFREVSEEEILASHHDSGTGCCGVHGGHGGKKGGGCGCSCSHG

SEQ ID NO: 7679 - protein, 275 aa, Helicobacter pylori
  misc_feature (B) LOCATION 1...275
  hypothetical: YES
MSKSLYQTLNVSENASQDEIKKSYRRLARQYHPDLNKTKEAEEKFKEINAAYEILSDEEKRRQYDQFGDNMFGGQNFSDFARSRGPSEDLDDILSSIFGKGGFSQRFSQNSQGFSGFNFSNFAPENLDVTAILNVSVLDTLLGNKKQVSVNNETFSLKIPIGVEEGEKIRVRNKGKMGRTGRGDLLLQIHIEEDEMYRREKDDIIQIFDLPLKTALFGGKIEIATWHKTLTLTIPPNTKAMQKFRIKDKGIKSRKTSHVGDCIASSFDLLKLKRF

SEQ ID NO: 7680 - protein, 278 aa, Helicobacter pylori
  misc_feature (B) LOCATION 1...278
  hypothetical: YES
MSKSLYQTLNVSENASQDEIKKSYRRLARQYHPDLNKTKEAEEKFKEINAAYEILSDEEKRRQYDQFGDNMFGGQNFSDFARSRGPSEDLDDILSSIFGKGGFSQRFSQNSQGFSGFNFSNFAPENLDVTAILNVSVLDTLLGNKKQVSVNNETFSLKIPIGVEEGEKIRVRNKGKMGRTGRGDLLLQIHIEEDEMYRREKDDIIQIFDLPLKTALFGGKIEIATWHKTLTLTIPPNTKAMQKFRIKDKGIKSRKTSHVGDCIASSFDLPKIETLLMS

SEQ ID NO: 7681 - protein, 87 aa, Helicobacter pylori
  misc_feature (B) LOCATION 1...87
  hypothetical: YES
MIILSASVKNLREISVKEKFLWLNAKSYLISVFAPFILLPWIDLLSAFLLYLGFLALFSVLEFFDEDIADIIIAKSKIKTKTKCYRA

SEQ ID NO: 7682 - protein, 100 aa, Helicobacter pylori
  misc_feature (B) LOCATION 1...100
  hypothetical: YES
SPEFGELVYGSFLMIILSASVKNLREISVKEKFLWLNAKSYLISVFAPFILLPWIDLLSAFLLYLGFLALFSVLEFFDEDIADIIIAKSKIKTKTKCYRA

SEQ ID NO: 7683 - protein, 45 aa, Helicobacter pylori
  misc_feature (B) LOCATION 1...45
  hypothetical: YES
MGIFINSLFYTNKLCSIRFLIVSKLVLKDDNFLGLASCETMKQIA

SEQ ID NO: 7684 - protein, 60 aa, Helicobacter pylori
  misc_feature (B) LOCATION 1...60
  hypothetical: YES
ISSLYSLCQVFNFPFMGIFINSLFYTNKLCSIRFLIVSKLVLKDDNFLGLASCETMKQIA

SEQ ID NO: 7685 - protein, 84 aa, Helicobacter pylori
  misc_feature (B) LOCATION 1...84
  hypothetical: YES
ISIKFFTNQIVKNAKKDFPSNPPQKNKEFKNKEFKNKEFKNKEFKNKEFKNKEFKNKEFKNKEFKNKASKQNPPKKKESLKERL

SEQ ID NO: 7686 - protein, 82 aa, Helicobacter pylori
  misc_feature (B) LOCATION 1...82
  hypothetical: YES
ETAKKNLQLSAQETACVGDDYNDLGMFKACTLSFAPFDAHPLLKSKAYKVLQNSGGKGAVREAIDYLLELEGLQDEVLKLYL

SEQ ID NO: 7687 - protein, 81 aa, Helicobacter pylori
  misc_feature (B) LOCATION 1...81
  hypothetical: YES
TAKKNLQLSAQETACVGDDYNDLGMFKACTLSFAPFDAHPLLKSKAYKVLQNSGGKGAVREAIDYLLELEGLQDEVLKLYL

SEQ ID NO: 7688 - protein, 90 aa, Helicobacter pylori
  misc_feature (B) LOCATION 1...90
  hypothetical: YES
GFYEKIQPECGFNERMIKLLLLDVDGTLTDGSLYFDENFHEIKAFNVKDGLGMTLWQKLGKKIAIITGRTSIMVKKRMESLGVQFVFMGG

SEQ ID NO: 7689 - protein, 164 aa, Helicobacter pylori
  misc_feature (B) LOCATION 1...164
  hypothetical: YES
MIKLLLLDVDGTLTDGSLYFDENFHEIKAFNVKDGLGMTLWQKLGKKIAIITGRTSIMVKKRMESLGVQFVFMGVENKNAVIERLKKDLQLSAQEIACVGDDYNDLGMFKACTLSFAPFDAHPLLKSKAYKVLQNSGGKGAVREAIDYLLELEGLQDEVLKLYL

SEQ ID NO: 7690 - protein, 54 aa, Helicobacter pylori
  misc_feature (B) LOCATION 1...54
  hypothetical: YES
KKWRKKVKTKAFYTSFRQHYNTLFNEVKQIKPIQSEQKNALNVGYNPISRFLFV

SEQ ID NO: 7691 - protein, 133 aa, Helicobacter pylori
  misc_feature (B) LOCATION 1...133
  hypothetical: YES
RLMREKFVYVEGESDKIFLTILNEVKNLGLKDSNIINCGSKDKLSEEAESIKGNLKAKDIYIVFDSDNQTKETKIQEIKKQLQENTKQEHRLNDEEFNQIKIFLLPENDETKHHPNYCELEPLLEKMAKESEN

SEQ ID NO: 7692 - protein, 176 aa, Helicobacter pylori
  misc_feature (B) LOCATION 1...176
  hypothetical: YES
MREKFVYVEGESDKIFLTILNEVKNLGLKDSNIINCGSKDKLSEEAESIKGNLKAKDIYIVFDSDNQTKETKIQEIKKQLQENTKQEHRLNDEEFNQIKIFLLPENDETKHHPNYCELEPLLEKMAKESENKAFYTSFRQHYNTLFNEVKQIKPIQSEQKNALNVGYNPISRFLFV

SEQ ID NO: 7693 - protein, 109 aa, Helicobacter pylori
  misc_feature (B) LOCATION 1...109
  hypothetical: YES
KSPYRHSISSQVSVENDEEIIEVEKGENQGAFSYFLGGPTCLAGDFMGSFSFETPLKRGDKIVFQDMLHYTIVKNNSFNGVPLPSLAKIDSQGFKILKSFSYEDYKNRN

SEQ ID NO: 7694 - protein, 144 aa, Helicobacter pylori
  misc_feature (B) LOCATION 1...144
  hypothetical: YES
MTGMWITPSGFEKGVKEHGLEGVSGLHFHTHCEQNADALCRTLEHVERHFKPYLENMAWVNFGGGHHITRSDYDVNLLIQTIKDFKERYHNTEVILEPGEVIGWQCGFSIASVIDIVQNDQEIAILDASFSAHMPDCLEITLSP

SEQ ID NO: 7695 - protein, 405 aa, Helicobacter pylori
  misc_feature (B) LOCATION 1...405
  hypothetical: YES
MKKYSAIPTPCYALESERLEKNAKILEIVRQQSGAKVLLALKGYAFWREFGILRQKLNGCCASGLYEAKLAFEEFGGRESHKEICVYSPAFKEAEMSAILPLATSIIFNSFHQYATYKDRILDKNKQLENLGLSPIKMGLRINPLYSEVTPAIYNPCSKMSRLGITPSGFEKGVKEHGLEGVSGLHFHTHCEQNADALCRTLEHVERHFKPYLENMAWVNFGGGHHITRSDYDVNLLIQTIKDFKERYHNTEVILEPGEAIGWQCGFLIASVIDIVQNDQEIAILDASFSAHMPDCLEMPYRPSILKVSVENDEEIIEVEKGENQGAFSYFLGGPTCLAGDFMGSFSFETPLKRGDKIVFQDMLHYTIVKNNSFNGVPLPSLAKIDSQGFKILKSFSYEDYKNRN

SEQ ID NO: 7696 - protein, 90 aa, Helicobacter pylori
  misc_feature (B) LOCATION 1...90
  hypothetical: YES
LITKENPISSTTPTQNSEYFGSFKRLAILKIKTIMTENKIKQTHNPKNPHSSAIPAKTMSVCTSLKNPSLICPSPSPCPNNPPLCMALPA

SEQ ID NO: 7697 - protein, 109 aa, Helicobacter pylori
  misc_feature (B) LOCATION 1...109
  hypothetical: YES
LKNGTARPLTGKIPPTPKALITKENPISSTTPTQNSEYFGSFKRLAILKIKTIMTENKIKQTHNPKNPHSSAIPAKTMSVCTSLKNPSLICPSPSPCPNNPPLCMALPA

SEQ ID NO: 7698 - protein, 237 aa, Helicobacter pylori
  misc_feature (B) LOCATION 1...237
  hypothetical: YES
LEFLKRLSSSDLKDLFDALVYDEDGTLRMNEELTSLTEYQRYGHDYAKYPRRIAEELQRYGGNSFANFFRDEGVLYKEILCDACDHLDINYNERSATSLIEQNMLSKLLKDSLEKMSGREIKELCDGLGMPNIDKVIGENKQVLIASVLTLFKAGGSHSYALAVAVADAMVRQTLGHGLSSVVGKVALKKTLDILAGPIGWVITGALVSINLAGPAYRVTVPACVLVATLRKKLKAE

SEQ ID NO: 7699 - protein, 248 aa, Helicobacter pylori
  misc_feature (B) LOCATION 1...248
  hypothetical: YES
RNNIIWHTNSDLEFLKRLSSSDLKDLFDALVYDEDGTLRMNEELTSLTEYQRYGHDYAKYPRRIAEELQRYGGNSFANFFRDEGVLYKEILCDACDHLDINYNERSATSLIEQNMLSKLLKDSLEKMSGREIKELCDGLGMPNIDKVIGENKQVLIASVLTLFKAGGSHSYALAVAVADAMVRQTLGHGLSSVVGKVALKKTLDILAGPIGWVITGALVSINLAGPAYRVTVPACVLVATLRKKLKAE

SEQ ID NO: 7700 - protein, 302 aa, Helicobacter pylori
  misc_feature (B) LOCATION 1...302
  hypothetical: YES
GEVMADSLAGIDQVTSLHKNNELQLLCFRLGKNKDLYAVNVFKIREVVKYHGNLTIISHENNSLVEGLIIIRELTIPLIDMKKWFYYDSQNKSKDLRPYRIQKEKSEDDIVMICEFSRWTIGVRIYEADRISSKKWTEMEQSAGLRGSAGNNKLVSRTRYFDGRLVQVVDIEKMLIDVFPWIEDEKHNDVETLSKIHSNQCVLLADDSPSVLKTMQMILDKLGVKHIDFINGKTLLEHLFNPTTDVSNIDLIITDLEMPEASGFEVINQVKNTPLTSTIPIVVNSSMSGSSYEKNGKNLNGQ

SEQ ID NO: 7701 - protein, 321 aa, Helicobacter pylori
  misc_feature (B) LOCATION 1...321
  hypothetical: YES
MADSLAGIDQVTSLHKNNELQLLCFRLGKNKDLYAVNVFKIREVVKYHGNLTIISHENNSLVEGLIIIRELTIPLIDMKKWFYYDSQNKSKDLRPYRIEKEKGEDDIVMICEFSRWTIGVRIYEADRILSKKWTEMEQSAGLGGSAGNNKLVSRTRYFDGRLVQVVDIEKMLIDVFPWIEDEKHNDLETLSKIHSNQCVLLADDSPSVLKTMQMILDKLGVKHIDFINGKTLLEHLFNPTTDVSNIGLIITDLEMPEASGFEVIKQVKNNPLTSKIPIVVNSSMSGSSNEDMARSLKADDFISKSNPKDIQRVVKQFLELA

SEQ ID NO: 7702 - protein, 111 aa, Helicobacter pylori
  misc_feature (B) LOCATION 1...111
  hypothetical: YES
LSKCPASLTSEMVILGRSNVGKSTFINTLLGKNLAKSSATPGKTRLANFFSTTWEDKENALTTTFNVIDLPGFGYAKVSKSLKKEWEGFLWELLSVRFSIKLFIHLIDARH

SEQ ID NO: 7703 - protein, 110 aa, Helicobacter pylori
  misc_feature (B) LOCATION 1...110
  hypothetical: YES
SKCPASLTSEMVILGRSNVGKSTFINTLLGKNLAKSSATPGKTRLANFFSTTWEDKENALTTTFNVIDLPGFGYAKVSKSLKKEWEGFLWELLSVRFSIKLFIHLIDARH

SEQ ID NO: 7704 - protein, 208 aa, Helicobacter pylori
  misc_feature (B) LOCATION 1...208
  hypothetical: YES
MIVIKDAHFLTSSNNLSQCPASLTSEMVILGRSNVGKSTFINTLLGKNLAKSSATPGKTRLANFFSTTWEDKENALTTTFNVIDLPGFGYAKVSKSLKKEWEGFLWELLSVRVSIKLFIHLIDARHLDLEIDKNAKENIQALLRPDQAYLSLFTKFDKLNKNEQHRLFLNAPKPFLINTIHFNALSSKYPTLEIVRQTLLKYLLTNPL

SEQ ID NO: 7705 - protein, 275 aa, Helicobacter pylori
  misc_feature (B) LOCATION 1...275
  hypothetical: YES
MQEFLGFGVVGNFAGHLEQAGESHSFINMKSEEKDAPKGLFPFYIPYENCYLGRCCINNHKIILPSDPDLRVQAEPEIALECDVKYDEKHLVTKLVPNFFMAFNDASVRNLEATKLSQKKNFSPASKGIGQKLPIDRFVYGGVCNNFSIASFLKYDNVWHIYGENSKLLKYEFFYQKLLDWIKNQLNHQQDGDSLEALRPFLERHNFPTKMIFAIGATPYMPFAQEHFLQKGDEVVIVAYNHLQYSFEKIQNLLEEDALQTKEHANLSYVYQIVE

SEQ ID NO: 7706 - protein, 278 aa, Helicobacter pylori
  misc_feature (B) LOCATION 1...278
  hypothetical: YES
EVCMQEFLGFGVVGNFAGHLEQAGESHSFINMKSEEKDAPKGLFPFYIPYENCYLGRCCINNHKIILPSDPDLRVQAEPEIALECDVKYDEKHLVTKLVPNFFMAFNDASVRNLEATKLSQKKNFSPASKGIGQKLPIDRFVYGGVCNNFSIASFLKYDNVWHIYGENSKLLKYEFFYQKLLDWIKNQLNHQQDGDSLEALRPFLERHNFPTKMIFAIGATPYMPFAQEHFLQKGDEVVIVAYNHLQYSFEKIQNLLEEDALQTKEHANLSYVYQIVE

SEQ ID NO: 7707 - protein, 254 aa, Helicobacter pylori
  misc_feature (B) LOCATION 1...254
  hypothetical: YES
MFIDTHCHLDHKDYENDLDEVLKESLEKGVTQCVIPGADMKDLNRAVGISEKFEGVFFAIGAHPYDVESFDEGLFEKFVSHQKCVAIGECGLDYYRLPELSERENYKSKQKEIFTKQIEFSIQHNKPLIIHIREASFDSLNLLKSYPKAFGVLHCFNADSMLLELSDRFYYGIGGVSTFKNAKRLVEILPKIPKNRLLLETDSPYLTPHPFRGTRNSPTYIPLIAQKIAEIIHIETEELASLSTHNAQTLFNFP

SEQ ID NO: 7708 - protein, 257 aa, Helicobacter pylori
  misc_feature (B) LOCATION 1...257
  hypothetical: YES
DKSMFIDTHCHLDHKDHENDLDEVLKESLEKGVTQCVIPGADMKDLNRAVGISEKFEGVFFAIGAHPYDVESFDEGLFEKFVSHQKCVAIGECGLDYYRLPELSERENYKSKQKEIFTKQIEFSIQHNKPLIIHIREASFDSLNLLKSYPKAFGVLHCFNADSMLLELSDRFYYGIGGVSTFKNAKRLVEILPKIPKNRLLLETDSPYLTPHPFRGTRNSPTYIPLIAQKIAEIIHIETEELASLSTHNAQTLFNFP

SEQ ID NO: 7709 - protein, 77 aa, Helicobacter pylori
  misc_feature (B) LOCATION 1...77
  hypothetical: YES
MQKEVLVEKPNPLTISYNLEQAISKLKESVVLLEKNEQYNDAYALVCGIKNTVDEFHKDVTLHVSNNSKPPKRKRKS

SEQ ID NO: 7710 - protein, 77 aa, Helicobacter pylori
  misc_feature (B) LOCATION 1...77
  hypothetical: YES
MQKEVLVEKPNPLTISYNLEQAISKLKESVVLLEKNEQYNDAYALVCGIKIIVDEFHKDVTLHVSNNSKPPKRKRKS

SEQ ID NO: 7711 - protein, 77 aa, Helicobacter pylori
  misc_feature (B) LOCATION 1...77
  hypothetical: YES
MQKEVLVEKPNPLTISYNLEQAISKLKESVVLLEKNEQYNDAYALVCGIKSIVDEFHKDVTLHVSNNSKPPKRKRKS

SEQ ID NO: 7712 - protein, 86 aa, Helicobacter pylori
  misc_feature (B) LOCATION 1...86
  hypothetical: YES
FILRLKGKNMQKEVLVEKPNPLTISYNLEQAISKLKESVVLLEKNEQYNDAYALVCGIKIIVDEFHKDVTLHVSNNSKPPKRKRKS

SEQ ID NO: 7713 - protein, 94 aa, Helicobacter pylori
  misc_feature (B) LOCATION 1...94
  hypothetical: YES
FLFLSNSHFILRLKGKNMQKEVLVEKPNPLTISYNLEQAISKLKESVVLLEKNEQYNDAYALVCGIKSIVDEFHKDVTLHVSNNSKPPKRKRKS

SEQ ID NO: 7714 - protein, 261 aa, Helicobacter pylori
  misc_feature (B) LOCATION 1...261
  hypothetical: YES
LVNYWTKLSIEYANQRSYLDDLFQVYPTIPEGLREIDSKIWSNVEYHFKRKDNLALITELLNLDLFPIKDSYMAYLKRDKSALERNPRTINRICGRLYEMGLNKIFEKCSEPKETNRQIGPMFKDWINNKSLGVEPVDLNDFIANENDAILKASDNVMAEFAKSHLNYHHHKGLDFVARFNKKYIIGEAKFLTDFGGHQNAQFNDAINTIETPNIKAIKVAILDGVLYIESNNKMRKLLDTTYRNYHIMSALVLREFLYQI

SEQ ID NO: 7715 - protein, 281 aa, Helicobacter pylori
  misc_feature (B) LOCATION 1...281
  hypothetical: YES
KFKQYFCYNPCSETIFKKVKLVNYWTKLSIEYANQRSYLDDLFQVYPTIPEGLREIDSKIWSNVEYHFKRKDNLALITELLNLDLFPIKDSYMAYLKRDKSALERNPRTINRICGRLYEMGLNKIFEKCSEPKETNRQIGPMFKDWINNKSLGVEPVDLNDFIANENDAILKASDNVMAEFAKSHLNYHHHKGLDFVARFNKKYIIGEAKFLTDFGGHQNAQFNDAINTIETPNIKAIKVAILDGVLYIESNNKMRKLLDTTYRNYHIMSALVLREFLYQI

SEQ ID NO: 7716 - protein, 100 aa, Helicobacter pylori
  misc_feature (B) LOCATION 1...100
  hypothetical: YES
MDFSQLGGLSGLLDGVKKDFSQLEEKNKDTIHTSKSGGGMVSVSFNGLGELVDLQIDDSLLEDKEAMQIYLMSALNDGYKAVEENRKNLAFNMLGNFAKL

SEQ ID NO: 7717 - protein, 565 aa, Helicobacter pylori
  misc_feature (B) LOCATION 1...565
  hypothetical: YES
MLLNYDFLELVDDEPQRNTSLTSAIDKALADKKLARQNKPRVRVKDNLSLSETLDAYGRELSRLKNQQETIKASTIESSNLNSIVNKIKSGLPFGTISAFRPFKEAFIKDFTQDERELLVEAYKSGYKASQLDKVSKKWRDDPNPIDASYLADAFLREYRTIALKLSTALGKPFVNKFLNPKSETTMKDFMSSEKFVKKYRFTQKDNIKRTQELKSLLDQKRHFLGYLQVTGYWKDKLNDPLLPSKEVSFFVFQNEPSNSFNLKDQLLDLAKYFNQEAICYCQNAETGKVDLVLATEKDFGKVDMTFTGITFTIPLTQSITRLHNKVYTFFDKQGKDNYGVFFDELSTTKLKAMSIPKIADEFYRHLENRVKSFIRARQYHGSPRTFDADDIEKYELQAIKRLDLQRCAKSKSFKASYNHNIKINNLANALRQGKEVSKTLITKVLANTIDTDAGYCFISDLATQLGNISPRLSKSIVTAIEQAEGIRLLYALIDKVSYNSLHNTLNFIFDIDNPMSDQSLNELVVEVPREALKNVKLPQIKNELTSQIFDGAYQFRGNDYQFKG

SEQ ID NO: 7718 - protein, 582 aa, Helicobacter pylori
  misc_feature (B) LOCATION 1...582
  hypothetical: YES
RLKDKALQSRLKQKDTIMLLNYDFLELVDDEPQRNTSLTSAIDKALADKKLARQNKPRVRVKDNLSLSETLDAYGRELSRLKNQQETIKASTIESSNLNSIVNKIKSGLPFGTISAFRPFKEAFIKDFTQDERELLVEAYKSGYKASQLDKVSKKWRDDPNPIDASYLADAFLREYRTIALKLSTALGKPFVNKFLNPKSETTMKDFMSSEKFVKKYRFTQKDNIKRTQELKSLLDQKRHFLGYLQVTGYWKDKLNDPLLPSKEVSFFVFQNEPSNSFNLKDQLLDLAKYFNQEAICYCQNAETGKVDLVLATEKDFGKVDMTFTGITFTIPLTQSITRLHNKVYTFFDKQGKDNYGVFFDELSTTKLKAMSIPKIADEFYRHLENRVKSFIRARQYHGSPRTFDADDIEKYELQAIKRLDLQRCAKSKSFKASYNHNIKINNLANALRQGKEVSKTLITKVLANTIDTDAGYCFISDLATQLGNISPRLSKSIVTAIEQAEGIRLLYALIDKVSYNSLHNTLNFIFDIDNPMSDQSLNELVVEVPREALKNVKLPQIKNELTSQIFDGAYQFRGNDYQFKG

SEQ ID NO: 7719 - protein, 90 aa, Helicobacter pylori
  misc_feature (B) LOCATION 1...90
  hypothetical: YES
MKMHQIPTPTMSQVIMLNDSITTAEFMVSALRDFFDKPLEEAQKLMLSIHRDGDGVCGVYPYEIAIYKAVCVRDKARARFPLRLMVQEVK

SEQ ID NO: 7720 - protein, 94 aa, Helicobacter pylori
  misc_feature (B) LOCATION 1...94
  hypothetical: YES
SLSSMKMHQIPTPTMSQVIMLNDSITTAEFMVSALRDFFDKPLEEAQKLMLSIHRDGDGVCGVYPYEIAIYKAVCVRDKARARFPLRLMVQEVK

SEQ ID NO: 7721 - protein, 330 aa, Helicobacter pylori
  misc_feature (B) LOCATION 1...330
  hypothetical: YES
MKRMLAEFEKIQAILMAFPHEFGDWAYCIEEARESFLHIIQTIAKHAKVLVCVHTNDTIGYETLKNLPGVEIARIDTNDTWARDFGAISVENHGVLECLDFGFNGWGLKYPSNLDNQVNFKLKHLGFLKHPLKTMPYILEGGSIESDGAGSILTNTQCLLEKNRNPHLNQNGIETMLKKELGAKQVLWYSYGYLKGDDTDSHTDTLARFLNKDTIVYSACEDENDEHYTALKKMQEELKTFKKLDGTPYKLIPLEIPKAVYNENQQRLPATYVNFLLCNNALIVPTYNDPNDTLILETLRQHTPLEVIGVDCNTLIKQHGSLHCVTMQLY

SEQ ID NO: 7722 - protein, 337 aa, Helicobacter pylori
  misc_feature (B) LOCATION 1...337
  hypothetical: YES
LLKRIFLMKRMLAEFEKIQAILMAFPHEFGDWAYCIEEARESFLHIIQTIAKHAKVLVCVHTNDTIGYETLKNLPGVEIARIDTNDTWARDFGAISVENHGVLECLDFGFNGWGLKYPSNLDNQVNFKLKHLGFLKHPLKTMPYILEGGSIESDGAGSILTNTQCLLEKNRNPHLNQNGIETMLKKELGAKQVLWYSYGYLKGDDTDSHTDTLARFLNKDTIVYSACEDENDEHYTALKKMQEELKTFKKLDGTPYKLIPLEIPKAVYNENQQRLPATYVNFLLCNNALIVPTYNDPNDTLILETLRQHTPLEVIGVDCNTLIKQHGSLHCVTMQLY

SEQ ID NO: 7723 - protein, 98 aa, Helicobacter pylori
  misc_feature (B) LOCATION 1...98
  hypothetical: YES
VFFVGCSGSEKPPIDIEVTFSRYGHGLYWIDIISNVDSITILLSAKINRGNCDNDRLPYFKINKTLKFGDSYQFYILRCQHIKEVSIKTDKGTWNFGK

SEQ ID NO: 7724 - protein, 105 aa, Helicobacter pylori
  misc_feature (B) LOCATION 1...105
  hypothetical: YES
AVIFGFAVFFVGCSGSEKPPIDIEVTFSRYGHGLYWIDIISNVDSITILLSAKINRGNCDNDRLPYFKINKTLKFGDSYQFYILRCQHIKEVSIKTDKGTWNFGK

SEQ ID NO: 7725 - protein, 137 aa, Helicobacter pylori
  misc_feature (B) LOCATION 1...137
  hypothetical: YES
MNILFGISDTQECYNAIKFAVKLAHSLKEVRFTLLHVSMEVFIYSESGMMDYGQTEALEEEKAKALLKQFEDAFKKENIECESVLKSGDLIDVVLDMAKDYDLLLIGASESNLLYRLFISHQNSLVEQSSIPVVIAK

SEQ ID NO: 7726 - protein, 152 aa, Helicobacter pylori
  misc_feature (B) LOCATION 1...152
  hypothetical: YES
GLFGIISKLHLRLVLMNILFGISDTQECYNAIKFAVKLAHSLKEVRFTLLHVSMEVFIYSESGMMDYSQTEALEEEKAKALLKQFEDAFKKENIECESVLKSGDLIDVVLDMAKDYDLLLIGASESNLLYRLFISHQNSLVEQSSIPVVIAK

SEQ ID NO: 7727 - protein, 156 aa, Helicobacter pylori
  misc_feature (B) LOCATION 1...156
  hypothetical: YES
MLYIPPTSKEVYVSSIVALNIHSPQGTGDWHSSYALMENAFDDIGVYIYGEKQAHNTNKLLGNLGIIDGTARLNKMGYYPKHTPTYIAEHPRACVDCLYVSVLQTGKLGVVMLDEWFPSIEDKESVYALIEVMKPKLNKQERENLDKWIAKNPIIE

SEQ ID NO: 7728 - protein, 164 aa, Helicobacter pylori
  misc_feature (B) LOCATION 1...164
  hypothetical: YES
LKLMREFSMLYIPPTSKEVYVSSIVALNIHSPQGTGDWHSSYALMENAFDDIGVYIYGEKQAHNTNKLLGNLGIIDGTARLNKMGYYPKHTPTYIAEHPRACVDCLYVSVLQTGKLGVVMLDEWFPSIEDKESVYALIEVMKPKLNKQERENLDKWIAKNPIIE

SEQ ID NO: 7729 - protein, 282 aa, Helicobacter pylori
  misc_feature (B) LOCATION 1...282
  hypothetical: YES
MPTIDFTFCEINPKKGFGGANGNKISLFYNNELYMVKFPPKPSTHKEMSYTNGCFSEYVACHIVNSLGLKVQETLLGTYKNKIVVACKDFTTHQYELVDFLSLKNTMIELEKSGKDTNLNDVLYAIDNQHFIEPKVLKCFFWDMFVADTLLGNFDRHNGNWGFLRASNSKEYQIAPIFDCGSCLYPQADDVVCQKVLSNIDELNARIYNFPQSILKDDNDKKINYYDFLTQTNNKDCLDALLRIYPRIDMNKIHSIIDNTPFMSEIHKEFLPTMLDERKSRL

SEQ ID NO: 7730 - protein, 325 aa, Helicobacter pylori
  misc_feature (B) LOCATION 1...325
  hypothetical: YES
MPTIDFTFCEINPKKGFGGANGNKISLFYNNELYMVKFPPKPSTHKEMSYTNGCFSEYVACHIVNSLGLKVQETLLGTYKNKIVVACKDFTTHQYELVDFLSLKNTMIELEKSGKDTNLNDVLYAIDNQHFIEPKVLKCFFWDMFVADTLLGNFDRHNGNWGFLRASNSKEYQIAPIFDCGSCLYPQADDVVCQKVLSNIDELNARIYNFPQSILKDDNDKKINYYDFLTQTNNKDCLDALLRIYPRIDMNKIHSIIDNTPFMSEIHKEFLHTMLDERKSKIIDVAHTRAIELSLQHKQAHSNPYDNADDLDNSNEYTPTPKRRR

SEQ ID NO: 7731 - protein, 325 aa, Helicobacter pylori; identical to SEQ ID NO: 7730
  misc_feature (B) LOCATION 1...325
  hypothetical: YES

SEQ ID NO: 7732 - protein, 352 aa, Helicobacter pylori
  misc_feature (B) LOCATION 1...352
  hypothetical: YES
QIIIISYSSCLCYNLSNNPLLIIKGQLMPTIDFTFCEINPKKGFGGANGNKISLFYNNELYMVKFPPKPSTHKEMSYTNGCFSEYVACHIVNSLGLKVQETLLGTYKNKIVVACKDFTTHQYELVDFLSLKNTMIELEKSGKDTNLNDVLYAIDNQHFIEPKVLKCFFWDMFVADTLLGNFDRHNGNWGFLRASNSKEYQIAPIFDCGSCLYPQADDVVCQKVLSNIDELNARIYNFPQSILKDDNDKKINYYDFLTQTNNKDCLDALLRIYPRIDMNKIHSIIDNTPFMSEIHKEFLHTMLDERKSKIIDVAHTRAIELSLQHKQAHSNPYDNADDLDNSNEYTPTPKRRR

SEQ ID NO: 7733 - protein, 241 aa, Helicobacter pylori
  misc_feature (B) LOCATION 1...241
  hypothetical: YES
LSDSLFPALEAFCLNLKQSLQSEFDFFYLSRNLASKDWLEPYKQAVLPVRCAKFYIHPSWHQKPSHAAIDDCIMIDPALAFGSGHHESTSMCLELLSSLDLKRKNALDVGCGSGILSIALKKQGVSALTACDTDSLAVEETLKNFSLNQIPLLAQDKVIYGSTQKIEGRFDIIVANLVADVIKSLYSEFVRLCNHTLILSGILETHLNSVLQIYYNGFEVLEQRQRNEWVALKLLKKQSIN

SEQ ID NO: 7734 - protein, 241 aa, Helicobacter pylori
  misc_feature (B) LOCATION 1...241
  hypothetical: YES
LSDSLFPALEAFCLNLKQSLQSEFDFFYLSRNLASKDWLEAYKQAVLPVRCAKFYIHPSWHQKPSHAAIDDCIMIDPALAFGSGHHESTSMCLELLSSLDLKRKNALDVGCGSGILSIALKKQGVSALTACDTDSLAVEETLKNFSLNQIPLLAQDKVIYGSTQKIEGRFDIIVANLVADVIKSLYSEFVRLCNHTLILSGILETHLNSVLQIYYNGFEVLEQRQRNEWVALKLLKKQSIN

SEQ ID NO: 7735 - protein, 314 aa, Helicobacter pylori
  misc_feature (B) LOCATION 1...314
  hypothetical: YES
GRELFESFLLDTTHLALEESSLENLKAFDDKETIEFVSQSSWRYFATHDPLKENLKEKPPHLKNFVILRSEKNLSDSLFPALEAFCLNLKQSLQSEFDFFYLSRNLASKDWLEPYKQAVLPVRCAKFYIHPSWHQKPSHAAIDDCIMIDPALAFGSGHHESTSMCLELLSSLDLKRKNALDVGCGSGILSIALKKQGVSALTACDTDSLAVEETLKNFSLNQIPLLAQDKVIYGSTQKIEGRFDIIVANLVADVIKSLYSEFVRLCNHTLILSGILETHLNSVLQIYYNGFEVLEQRQRNEWVALKLLKKQSIN

SEQ ID NO: 7736 - protein, 325 aa, Helicobacter pylori
  misc_feature (B) LOCATION 1...325
  hypothetical: YES
MYYEFFFIFPKERELFESFLLDTTHLALEESSLENLKAFDDKETIEFVSQSSWRYFATHDPLKENLKEKPPHLKNFVILRSEKNLSDSLFPALEAFCLNLKQSLQSEFDFFYLSRNLASKDWLEAYKQAVLPVRCAKFYIHPSWHQKPSHAAIDDCIMIDPALAFGSGHHESTSMCLELLSSLDLKRKNALDVGCGSGILSIALKKQGVSALTACDTDSLAVEETLKNFSLNQIPLLAQDKVIYGSTQKIEGRFDIIVANLVADVIKSLYSEFVRLCNHTLILSGILETHLNSVLQIYYNGFEVLEQRQRNEWVALKLLKKQSIN

SEQ ID NO: 7737 - protein, 64 aa, Helicobacter pylori
  misc_feature (B) LOCATION 1...64
  hypothetical: YES
LCFHQIHKILSKLKKAEGLIRQFVFQASGWFKCPKLSFVLDDSLEKQLRLDAIFNEIAKGKDND

SEQ ID NO: 7738 - protein, 80 aa, Helicobacter pylori
  misc_feature (B) LOCATION 1...80
  hypothetical: YES
ALLKWNALKGSTTLWCLCFHQIHKILSKLKKAEGLIRQFVFQASGWFKCPKLSFVLDDSLEKQLRLDAIFNEIAKGKDND

SEQ ID NO: 7739 - protein, 111 aa, Helicobacter pylori
  misc_feature (B) LOCATION 1...111
  hypothetical: YES
MNAHKERLESNLLELLQEALASLNDSELNSLSVTKVECSKGKHHALVFVLSSDHKILSKLKKAEGLIRQFVLQASGWFKCPKLSFVLDDSLEKQLRLDAIFNEIAKGKDND

SEQ ID NO: 7740 - protein, 235 aa, Helicobacter pylori
  misc_feature (B) LOCATION 1...235
  hypothetical: YES
MRLDYALFNQHLANSREKAKALVLKKQVLVNKMVVSKPSFIVKEGDQIELIAPNLFVSRAGEKLGAFLEDHFIDFKEKVVLDVGASKGGFSQVALLKGAKKVLCVDVGKMQLDESLKNDQRIECYEECDIRGFKTPEKIDLALCDVSFISLYCILEAILPLSGEFLTLFKPQFEVGRTIKRNKKGVVMDKEAILNALENFKNHLKTKDFQILTIQESLVKGKNGNVEFFIHFKRA

SEQ ID NO: 7741 - protein, 235 aa, Helicobacter pylori; identical to SEQ ID NO: 7740
  misc_feature (B) LOCATION 1...235
  hypothetical: YES

SEQ ID NO: 7742 - protein, 246 aa, Helicobacter pylori
  misc_feature (B) LOCATION 1...246
  hypothetical: YES
FRLPSPLTSILMRLDYALFNQHLANSREKAKALVLKKQVLVNKMVVSKPSFIVKEGDQIELIAPNLFVSRAGEKLGAFLEDHFIDFKEKVVLDVGASKGGFSQVALLKGAKKVLCVDVGKMQLDESLKNDQRIECYEECDIRGFKTPEKIDLALCDVSFISLYCILEAILPLSGEFLTLFKPQFEVGRTIKRNKKGVVMDKEAILNALENFKNHLKTKDFQILTIQESLVKGKNGNVEFFIHFKRA

SEQ ID NO: 7743 - protein, 44 aa, Helicobacter pylori
  misc_feature (B) LOCATION 1...44
  hypothetical: YES
LLFNVLIIKAFFKAINLAPARIPMPAPIETHLTEFAHIAIPVRP

SEQ ID NO: 7744 - protein, 90 aa, Helicobacter pylori
  misc_feature (B) LOCATION 1...90
  hypothetical: YES
RNEFIQNDKIEVFKPFQKSFKLLVFITNAFYKQLTLVLSVIENFFNLLFNVLIIKAFFKAINLAPARIPMPAPIETHLTEFAHIAIPVRP

SEQ ID NO: 7745 - protein, 100 aa, Helicobacter pylori
  misc_feature (B) LOCATION 1...100
  hypothetical: YES
VATTPYSPPTLKPCKSLANNKNKNAHSPTISLVGSNASMKEPSAIRIMEYTMEVLRPFLSPNLPKNKLPKGRMKNPSIKTKKAEMSARVGSLVWVNSLAK

SEQ ID NO: 7746 - protein, 100 aa, Helicobacter pylori; identical to SEQ ID NO: 7745
  misc_feature (B) LOCATION 1...100
  hypothetical: YES

SEQ ID NO: 7747 - protein, 66 aa, Helicobacter pylori
  misc_feature (B) LOCATION 1...66
  hypothetical: YES
MKVTFQVPSITCNHCVDKIEKFVGEIEGVSFIDASVEKKSVVVEFDTPATQDLIKEALLDAGQEVV

SEQ ID NO: 7748 - protein, 66 aa, Helicobacter pylori; identical to SEQ ID NO: 7747
  misc_feature (B) LOCATION 1...66
  hypothetical: YES

SEQ ID NO: 7749 - protein, 280 aa, Helicobacter pylori
  misc_feature (B) LOCATION 1...280
  hypothetical: YES
MLNFLSISSEPEIKSLAIGKFDGLHLGHQALFKELKDPKALLIIEKKHYTKGYLTPLKYRAKLVKMPLFFVYLEEISQLNALEFLDLLKKKFPNLERLVVGYDFRFGHERQNDALFLKERFEKTIIVPEVKIQNISVHSKIIKLALSHGDLSLANKLLGRYYEVCGEVISDQGLGHKELAPTLNIKTKDFILPSFGVYASLVKIKDQIYQKSVSFIGNRLSTDHNFAIECHVLDTIIENPPKEIALRWVQKIRDNMRFNSLKELKNQIQQDILMAKEILR

SEQ ID NO: 7750 - protein, 285 aa, Helicobacter pylori
  misc_feature (B) LOCATION 1...285
  hypothetical: YES
KGKTGMLNFLSISSEPEIKSLAIGKFDGLHLGHQALFKELKDPKALLIIEKKHYTKGYLTPLKYRAKLVKMPLFFVYLEEISQLNALEFLDLLKKKFPNLERLVVGYDFRFGHERQNDALFLKERFEKTIIVPEVKIQNISVHSKIIKLALSHGDLSLANKLLGRYYEVCGEVISDQGLGHKELAPTLNIKTKDFILPSFGVYASLVKIKDQIYQKSVSFIGNRLSTDHNFAIECHVLDTIIENPPKEIALRWVQKIRDNMRFNSLKELKNQIQQDILMAKEILR

SEQ ID NO: 7751 - protein, 70 aa, Helicobacter pylori
  misc_feature (B) LOCATION 1...70
  hypothetical: YES
LYSTTGFDFNDNTPILAYANKYFVSKERESLTDFKDLKILPKDFMLPSFLEKDKFTQLNTPFYICLLFSV

SEQ ID NO: 7752 - protein, 165 aa, Helicobacter pylori
  misc_feature (B) LOCATION 1...165
  hypothetical: YES
LELDLALISLGERVLLGVYQNDFLCNSYTSKSKTSEALVGVFSQLFEDFKNPTIYPTIYPDLPAIKGVYYAKGPGSFTSLKLTHVFLHTLALIHDFELYSTTGFDFNDNTPILAYANKYFVSKERESLTDFKDLKILPKDFMLPSFLEKDKFTQLNTPFYILPPI

SEQ ID NO: 7753 - protein, 137 aa, Helicobacter pylori
  misc_feature (B) LOCATION 1...137
  hypothetical: YES
GEKHSMSDMVDLKKFVTELGKTQKELKNVIEQAKDIGLELKTNSKMTPEQAGKLYKYIVDGIKEQIQANQPTKNPKQDNKDDLNTAATPKPLAKKASKTPKKEETKAQSKSKKTKEKKKEGSCAYYQKERNRDCQYF

SEQ ID NO: 7754 - protein, 192 aa, Helicobacter pylori
  misc_feature (B) LOCATION 1...192
  hypothetical: YES
TNSTKGNANTTNNANSASNVSNAKKEISEVKKQEQEIKRHENIKRRTGFRVIKRNDETENETENSVTESKKPTQSAAAIFEDIKKEWQEKDKQETKKTKKPSKPKATPTAKNNKSHKIDFSDVRDFKGNDIYDDETDEILLFDLHEQDNLNKEEEEKEARQNINDRVRVQRKNPWMNEGGDQTTIQGKARIP

SEQ ID NO: 7755 - protein, 360 aa, Helicobacter pylori
  misc_feature (B) LOCATION 1...360
  hypothetical: YES
MSDMVDLKKFVTELGKTQKELKNVIEQAKDIGLELKTNFKMTPEQAGKLYKYIVDGIKEQIQANQPTKNPKQDNKDDLNTAATPKPLAKKASKTPKKEETKAQPKPKKTKEKKKEAPAPIIKKKEIEIVNTFENQTPLVENTPKAVSHSQIEKAKQKLQEIQKSREALNKLTQSNTNTTNNANSASNVSNAKKEISEVKKQEQEIKRHENIKRRTGFRVIKRNDETENETENSVTESKKPTQSAAAIFEDIKKEWQEKDKQETKKTKKPSKPKATPTAKNNKSHKIDFSDVRDFKGNDIYDDETDEILLFDLHEQDNLNKEEEEKEARQNINDRVRVQRKNPWMNEGGDQTTIQEKARIP

SEQ ID NO: 7756 - protein, 194 aa, Helicobacter pylori
  misc_feature (B) LOCATION 1...194
  hypothetical: YES
MLKTNQKNVHAFEIEKQEPEAVMEFLEKNHALLQYFLIIFKYDIESEVKAVLHKHQLLFLETNRALNGRYIKTTEKDANLLKQNSPNAIEPKTTIYERNIRSGEEIYSTNHLIFLGNIHNGAKIISEGSVSVYGVCEGAIVCFGEYLILKEVKSAQIVFQNKILSLKEVERLLVNKNIKIITKNDDILDIKEVL

SEQ ID NO: 7757 - protein, 217 aa, Helicobacter pylori
  misc_feature (B) LOCATION 1...217
  hypothetical: YES
AMDKNQYHCPHRASQTAFNERIVMLKTNQKNVHAFEIEKQEPEAVMEFLEKNHALLQYFLIIFKYDIESEVKPVLHKHQLLFLETNRALNGRYIKTTEKDANLLKQNSPNAIEPKTTIYERNIRSGEEIYDTNHLIFLGNIHNGAKIISEGSVSVYGVCEGAIVCFGEYLILKEVKSAQIVFQNKILSLKEVERLLVNKNIKIITKNDDILDIKEVL

SEQ ID NO: 7758 - protein, 113 aa, Helicobacter pylori
  misc_feature (B) LOCATION 1...113
  hypothetical: YES
MRRIIKNTLSRLGYEDVLEAEHGVEAWEKLDANADTKVLITDWNMPEMNGLDLVKKVRADNRFKEIPIIMITTEGGKAEVITTLKAGVNNYIVKPFTPQVLKEKLEVVLGTND

SEQ ID NO: 7759 - protein, 124 aa, Helicobacter pylori
  misc_feature (B) LOCATION 1...124
  hypothetical: YES
LKLLVVDDSSTMRRIIKNTLSRLGYEDVLEAEHGVEAWEKLDANADTKVLITDWNMPEMNGLDLVKKVRADNRFKEIPIIMITTEGGKAEVITTLKAGVNNYIVKPFTPQVLKEKLEVVLGTND

SEQ ID NO: 7760 - protein, 124 aa, Helicobacter pylori
  misc_feature (B) LOCATION 1...124
  hypothetical: YES
LKLLVVDDSSTMRRIIKNTLSRLGYEDVLEAEHGVEAWEKLDANADTKVLITDWNMPEMNGLDLVKKVRADNRFKEIPIIMITTEGGKAEVITALKAGVNNYIVKPFTPQVLKEKLEVVLGTND

SEQ ID NO: 7761 - protein, 134 aa, Helicobacter pylori
  misc_feature (B) LOCATION 1...134
  hypothetical: YES
FKCNLKRRSALKLLVVDDSSTMRRIIKNTLSRLGYEDVLEAEHGVEAWEKLDANADTKVLITDWNMPEMNGLDLVKKVRADNRFKEIPIIMITTEGGKAEVITTLKAGVNNYIVKPFTPQVLKEKLEVVLGTND

SEQ ID NO: 7762 - protein, 98 aa, Helicobacter pylori
  misc_feature (B) LOCATION 1...98
  hypothetical: YES
MREEAKKHFRIPLNRANKITLNFTGGYRSGVQIDRNAPKRVYKYTKKDCDLILGIDTRTIECYIIPIEDTQEWGNTKSLSQLQYYKENWQILIDLALE

SEQ ID NO: 7763 - protein, 99 aa, Helicobacter pylori
  misc_feature (B) LOCATION 1...99
  hypothetical: YES
GMREEAKKHFRIPLNRANKITLNFTGGYRSGVQIDRNAPKRVYKYTKKDCDLILGIDTRTIECYIIPIEDTQEWGNTKSLSQLQYYKENWQILIDLALE

SEQ ID NO: 7764 - protein, 778 aa, Helicobacter pylori
  misc_feature (B) LOCATION 1...778
  hypothetical: YES
MNLEKLFLEKAPLFVFSSTRRLKHFYLEQGEGFLPNAMSMGSFFEQAFYIPNQKKIPKSARQILMIDTIKAIAKEKKFILEGLLLFENSFLGYLESTSFLFDLFDELSSACIKLNELSFKDIYLDYEKHLEVLEMIYDRYVKKLEELGFYDKIMQKKPTILKEFFEHFSSIEWHLDGFMSVFERQCLLEVAELVPITLYLSCDKYNQKFLEFLNLKLETDCDYSIDFKTQKILSQTFNDQKIEPKLYANSSYLKQGALVLQTIEEYLQENNDPNKMAIITPNADFLPFLKLLDRNNNLNFAMGLGAKNSPYYTELVKILEDLQTSDCNLSGSALLDLENITLALLEQQSSKEKAPLKEAHSQIMHQYHLLKDTLKNYSLKDLLHLYLQEFEANFRLDDSSGGKIRVMDTLETRGMQFDKVVIADFNETCVPNLKDCDLFLNSALRQSLNLPTLLDKKNLQKHYYYQLFKNSKEVALSYIESETLKASNMLLELDLHTEPIKDAYTLFETSPIKEYQEEEIKAAIPKDFSFSASSLNAFLTCKRRFYYHYIKRFKETPKDESNSAVGSLIHELLKEAYEKDKNPHALEERLIWLSETRENVTPKERLDTLVALKKIQAFYKKERERFNAEITILDLEKSFETIIQGVIFKGRIDRIDKTADNEIILLDYKFKSDLKLDSMSEKQRKGLSPIEIAQISTDYQMAIYVRALKNLGYKEPIKAFFYDLRKGELLEEDELTLQAKMDHLEFSLIPKLKQEIDFEKTLEVKDCEYCSFKDMCNR

SEQ ID NO: 7765 - protein, 790 aa, Helicobacter pylori
  misc_feature (B) LOCATION 1...790
  hypothetical: YES
KHYRSSEKVTQRMNLEKLFLEKAPLFVFSSTRRLKHFYLEQGEGFLPNAMSMGSFFEQAFYIPNQKKIPKSARQILMIDTIKAIAKEKKFILEGLLLFENSFLGYLESTSFLFDLFDELSSACIKLNELSFKDIYLDYEKHLEVLEMIYDRYVKKLEELGFYDKIMQKKPTILKEFFEHFSSIEWHLDGFMSVFERQCLLEVAELVPITLYLSCDKYNQKFLEFLNLKLETDCDYSIDFKTQKILSQTFNDQKIEPKLYANSSYLKQGALVLQTIEEYLQENNDPNKMAIITPNADFLPFLKLLDRNNNLNFAMGLGAKNSPYYTELVKILEDLQTSDCNLSGSALLDLENITLALLEQQSSKEKAPLKEAHSQIMHQYHLLKDTLKNYSLKDLLHLYLQEFEANFRLDDSSGGKIRVMDTLETRGMQFDKVVIADFNETCVPNLKDCDLFLNSALRQSLNLPTLLDKKNLQKHYYYQLFKNSKEVALSYIESETLKASNMLLELDLHTEPIKDAYTLFETSPIKEYQEEEIKAAIPKDFSFSASSLNAFLTCKRRFYYHYIKRFKETPKDESNSAVGSLIHELLKEAYEKDKNPHALEERLIWLSETRENVTPKERLDTLVALKKIQAFYKKERERFNAEITILDLEKSFETIIQGVIFKGRIDRIDKTADNEIILLDYKFKSDLKLDSMSEKQRKGLSPIEIAQISTDYQMAIYVRALKNLGYKEPIKAFFYDLRKGELLEEDELTLQAKMDHLEFSLIPKLKQEIDFEKTLEVKDCEYCSFKDMCNR

SEQ ID NO: 7766 - protein, 200 aa, Helicobacter pylori
  misc_feature (B) LOCATION 1...200
  hypothetical: YES
RYTRHKGSIMKQTTINHSVELVGIGLHKGVPVKLVLEPLEENQGIVFYRSDLGVKLPLKPENIVDTKMATVLGKDNARISTIEHLLSAVHAYGIDNLKISVDNEEIPIMDGSALTYCMLLDEAGIKELDAPKKVMEIKQAVEVREGDKFVKIEPDSQLSLNFTIDFNHPVSLSKPIISSLVKPLTKSKSLKPAPLGFCKK

SEQ ID NO: 7767 - protein, 295 aa, Helicobacter pylori
  misc_feature (B) LOCATION 1...295
  hypothetical: YES
MKQTTINHSVELVGIGLHKGVPVKLVLEPLEENQGIVFYRSDLGVKLPLKPENIVDTKMATVLGKDNARISTIEHLLSAVHAYGIDNLKISVDNEEIPIMDGSALTYCMLLDEAGIKELDAPKKVMEIKQAVEVREGDKFVKIEPDSQLSLNFTIDFNHPVIAKQAHHFVFSKTAYKEQVAKARTFGFLQEVNYLRSIGLAKGGSLNNCIVLDENSILNKEGLRCEKEFVCHKILDAMGDLMVLGMPVMGKYTSFSGSHKLNSMLVKAILADAKNYEVLIASDPAKEFALQKAFA

SEQ ID NO: 7768 - protein, 272 aa, Helicobacter pylori
  misc_feature (B) LOCATION 1...272
  hypothetical: YES
MGIKEKEIELETLKREIAQAEASLEQDFIKHMVDKTNEKVEDLFFSNKPEFYRFVFTEQNNYLREKLTDKVGRAMDLIDEIQRDKTENESLENGAKFKKRFVFELQNDLIFLRTKRNTYSAKTEHENFQEKLLAAKDTFRLIKANDFKTKIYPYQIILRLKTKHIIVFKWLKKEIIKRFVKKDLFTETLSIKITDKKGRKYALIANYNHASDIIELMLDDKTYTTTLYYQKPLFDLIKNSNFNLTIKDNTLEINQAKNAYSFKAKNTKTLEY

SEQ ID NO: 7769 - protein, 297 aa, Helicobacter pylori
  misc_feature (B) LOCATION 1...297
  hypothetical: YES
KRGGVLGNNTRNLKSKRSYQIQRISMGIKEKEIELETLKREIAQAEASLEQDFIKHMVDKTNEKVEDLFFSNKPEFYRFVFTEQNNYLREKLTDKVGRAMDLIDEIQRDKTENESLENGAKFKKRFVFELQNDLIFLRTKRNTYSAKTEHENFQEKLLAAKDTFRLIKANDFKTKIYPYQIILRLKTKHIIVFKWLKKEIIKRFVKKDLFTETLSIKITDKKGRKYALIANYNHASDIIELMLDDKTYTTTLYYQKPLFDLIKNSNFNLTIKDNTLEINQAKNAYSFKAKNTKTLEY

SEQ ID NO: 7770 - protein, 65 aa, Helicobacter pylori
  misc_feature (B) LOCATION 1...65
  hypothetical: YES
RPEQTFIHRDGYKTRVLGLYYPNPLKKIPTKSLECGEIGIVSLGLKSVTDIAVGDTLTDAENPTS

SEQ ID NO: 7771 - protein, 257 aa, Helicobacter pylori
  misc_feature (B) LOCATION 1...257
  hypothetical: YES
VGFLRLLHMEVIKERLEREFSLNLIATAPTVVYEVHLTDNSIKYVQNPSDLPPENHIVCIKEPFFRATIITPSNFWGNLMQLLNNKRGIQEKMEYLNQSRVMLTYSLPSNEIVMDFYDKLKSCTKGYASLDYEPIENREANLVKLDVRVAGDVVDALSIIIDKNKAYEKGRALVETMKELIPRQLFEVAIQASVGNKIIARETIKSVGKNVTAKCYGGDITRKRKLLEKQKEGKKRMKAIGKVELPQEAFLAILKID

SEQ ID NO: 7772 - protein, 373 aa, Helicobacter pylori
  misc_feature (B) LOCATION 1...373
  hypothetical: YES
VMGTGKKHGVLGLYYPNPLKKIPTKSLECGEIGIVSLGLKSVTDIAVGDTLTDAENPTSKPIEGFMPAKPFVFAGLYPIETDRFEDLREALLKLQLNDCALNFEPESSVALGFGFRVGFLGLLHMEVIKERLEREFSLNLIATAPTVVYEVHLTDNSIKYVQNPSELPPENHIACIKEPFVRATIITPSEFLGNLMQLLNNKRGIQEKMEYLNQSRVMLTYSLPSNEIVMDFYDKLKSCTKGYASFDYEPIENREANLVKLDVRVAGDVVDALSIIIDKNKAYEKGRALVETMKELIPRQLFEVAIQASVGNKIIARETIKSVGKNVTAKCYGGDITRKRKLLEKQKEGKKRMKAIGKVELPQEAFLAILKID

SEQ ID NO: 7773 - protein, 126 aa, Helicobacter pylori
  misc_feature (B) LOCATION 1...126
  hypothetical: YES
EATLLRITMDNISSNVQTHLLSLKKHDCSVYYQDKKGFLSYSMGGISVLANLFLTQNPDFDFYIDVNSKGNVSLRANGNCDVCELSQMCFNGGGHRNASGGKIDGFKESFNYKDIKEQVEEIFNNA

SEQ ID NO: 7774 - protein, 129 aa, Helicobacter pylori
  misc_feature (B) LOCATION 1...129
  hypothetical: YES
FNLIYKIKRKMMQVYHLSHIDLDGYACQLVSKQFFKNIQCYNANYGREVSARIYEILNAIAQSKESEFLILVSDLNLNLNEAEYLQDKIQEHRLQNKDIQIQLLDHHISGKEVAESFHWYFLDTNRCAT

SEQ ID NO: 7775 - protein, 136 aa, Helicobacter pylori
  misc_feature (B) LOCATION 1...136
  hypothetical: YES
TRTAARPKIVYEFLKKYYAILESKNTLWLEPLVEMVNSVDIWDTQGYGFELGKVCMRMITQSSELNRFMFDDENRNYKLKLLEEVKNYLFLENAPVAYDNDLFKLKKIALGGDPTTNNDGQYLFKRANAFALFKKA

SEQ ID NO: 7776 - protein, 347 aa, Helicobacter pylori
  misc_feature (B) LOCATION 1...347
  hypothetical: YES
MQVYHLSHIDLDGYACQLVSKQFFKNIQCYNANYGREVSARIYEILNAIAQSKESEFLILVSDLNLNLNEAEYLQDKIQEHRLQNKDIQIQLLDHHISGKEVAESFHWYFLDTNRCATKIVYEFLKKYYAILESKNTLWLEPLVEMVNSVDIWDTQGYGFELGKVCMRMITQSSELNRFMFDDENRNYKLKLLEEVKNYLFLENAPVAYDNDLFKLKKIALGGDPTTETMDNISSNVQTHLLSLKKHDCSVYYQDKKGFLSYSMGGISVLANLFLTQNPDFDFYIDVNSKGNVSLRANGNCDVCELSQMCFNGGGHRNASGGKIDGFKESFNYKDIKEQVEEIFNNA

SEQ ID NO: 7777 - protein, 348 aa, Helicobacter pylori
  misc_feature (B) LOCATION 1...348
  hypothetical: YES
MMQVYHLSHIDLDGYACQLVSKQFFKNIQCYNANYGREVSARIYEILNAIAQSKESEFLILVSDLNLNLNEAEYLQDKIQEHRLQNKDIQIQLLDHHISGKEVAESFHWYFLDTNRCATKIVYEFLKKYYAILESKNTLWLEPLVEMVNSVDIWDTQGYGFELGKVCMRMITQSSELNRFMFDDENRNYKLKLLEEVKNYLFLENAPVAYDNDLFKLKKIALGGDPTTETMDNISSNVQTHLLSLKKHDCSVYYQDKKGFLSYSMGGISVLANLFLTQNPDFDFYIDVNSKGNVSLRANGNCDVCELSQMCFNGGGHRNASGGKIDGFKESFNYKDIKEQVEEIFNNA

SEQ ID NO: 7778 - protein, 381 aa, Helicobacter pylori
  misc_feature (B) LOCATION 1...381
  hypothetical: YES
MIQSVRIKNFKTFKDTQIDGFTKLNIITGQNNAGKSNLLEALYYLVGKSMHPCTNVLEIYDNIRKEPLTSESKNLMFYGLDTEKKIQITTTLDNNQTLDLQIKFIANENQKVIESQIIPTAEQTQMSSQLNFTLKKNNEEIYNDHLNIAKVPNFPPIPNQSGYNRQFKNFDPNQLQKLLPFESATIIPSDVVYRQAHMIQAVSKICSNNQLEEELNKHLNQFDNNIQSISFNTNNQLKLKVKNIKEKVPLSVFGDGLKKYLHIVSAFMADNAKTIYIDEVENGLHFSRMELLLRCVIDFINDNKDGNLQVFMTTHNQEFIEILDQVIREKDFAHQTKLFCLEQYNGSIVAEPYYGENLSLYFKNSANLFGGKERFKENNYE

SEQ ID NO: 7779 - protein, 384 aa, Helicobacter pylori
  misc_feature (B) LOCATION 1...384
  hypothetical: YES
RGSMIQSVRIKNFKTFKDTQIDGFTKLNIITGQNNAGKSNLLEALYYLVGKSMHPCTNVLEIYDNIRKEPLTSESKNLMFYGLDTEKKIQITTTLDNNQTLDLQIKFIANENQKVIESQIIPTAEQTQMSSQLNFTLKKNNEEIYNDHLNIAKVPNFPPIPNQSGYNRQFKNFDPNQLQKLLPFESATIIPSDVVYRQAHMIQAVSKICSNNQLEEELNKHLNQFDNNIQSISFNTNNQLKLKVKNIKEKVPLSVFGDGLKKYLHIVSAFMADNAKTIYIDEVENGLHFSRMELLLRCVIDFINDNKDGNLQVFMTTHNQEFIEILDQVIREKDFAHQTKLFCLEQYNGSIVAEPYYGENLSLYFKNSANLFGGKERFKENNYE

SEQ ID NO: 7780 - protein, 173 aa, Helicobacter pylori
  misc_feature (B) LOCATION 1...173
  hypothetical: YES
MDILKTLQKHLGDVETSDFKTNAIEKSQQIAKFSRDMKNINESVGALQVLQIACKKLLNKSMGLEDKDALQASIIKQELREIVENCQFLASPLFDTQLNIAINDEVFSMIVDNPLNLLENVGGFQAYLEEKLNEIKELLGYLSESLSNPKAFMPKQSFSNKSLKDLLSDDLRA

SEQ ID NO: 7781 - protein, 181 aa, Helicobacter pylori
  misc_feature (B) LOCATION 1...181
  hypothetical: YES
SILFKRFFMDILKTLQKHLGDVETSDFKTNAIEKSQQIAKFSRDMKNINESVGALQVLQIACKKLLNKSMGLEDKDALQASIIKQELREIVENCQFLASPLFDTQLNIAINDEVFSMIVDNPLNLLENVGGFQAYLEEKLNEIKELLGYLSESLSNPKAFMPKQSFSNKSLKDLLSDDLRA

SEQ ID NO: 7782 - protein, 86 aa, Helicobacter pylori
  misc_feature (B) LOCATION 1...86
  hypothetical: YES
LIIKKLDFNGAIKTLRELETIRTLSNHYRDGTNYSVSNLYGNTLSQTSLKHKSHNELNNKKNKHANTRMHGNFSQVKETKKFLQTH

SEQ ID NO: 7783 - protein, 89 aa, Helicobacter pylori
  misc_feature (B) LOCATION 1...89
  hypothetical: YES
ARKLIIKKLDFNGAIKTLRELETIRTLSNHYRDGTNYSVSNLYGNTLSQTSLKHKSHNELNNKKNKHANTRMHGNFSQVKETKKFLQTH

SEQ ID NO: 7784 - protein, 252 aa, Helicobacter pylori
  misc_feature (B) LOCATION 1...252
  hypothetical: YES
MTKHENYEILNLIGYALAKFDNDFIKEFGFSTKNAFFEYCVQIGLAETTGVIKNRMDLFDYFFPNKRKGWWQKGDAYIHRKLWIDSLFGNESVKGFSHIVKWFLQEQYGIKDLGVTPNAYLKTRYKSMQETGLEAELYFLNHYKNIKTFSCGHLKDMRLFGDGYDFYIQINKQAFLVEVKGIREKQGTLRLTQKEYEQAQTYNHDYVLVVVLNLSEKPYLLSIANPLKHLEFKACERKQKSILEYHLIGQIK

SEQ ID NO: 7785 - protein, 273 aa, Helicobacter pylori
  misc_feature (B) LOCATION 1...273
  hypothetical: YES
SGASPRSVFSDIKDRLGRLASMTKHENYEILNLIGYALAKFDNDFIKEFGFSTKNAFFEYCVQIGLAETTGVIKNRMDLFDYFFPNKRKGWWQKSDAYIHRKLWIDSLSGNESVKGFSHIVKWFLQEQYGIKDLGVTPNAYLKTRYKSMQETGLEAELYFLNHYKNIKTFSCGHLKDMRLFGDGYDFYIQINKQAFLVEVKGIREKQGTLRLTQKEYEQAQTYNHDYVLVVVLNLSEKPYLLSIANPLKHLEFKACERKQKSILEYHLIGQIK

SEQ ID NO: 7786 - protein, 177 aa, Helicobacter pylori
  misc_feature (B) LOCATION 1...177
  hypothetical: YES
LDAHEYQSVFAKHIGAVAAPTASLHFSQNALEKLLKDFKHAFLTLHVGAGTFLSVETKDIREHQIHTEVLHIPKKSQEILQESQEVLCIGTTALRSVEYFKRLKNPNQESFECDIFLHLANPIQHVNHLLTNFHLPKSSLLMLVSAMIGLEKTKEIYKIAIEKKYRFYSYGDGMLIL

SEQ ID NO: 7787 - protein, 198 aa, Helicobacter pylori
  misc_feature (B) LOCATION 1...198
  hypothetical: YES
LKEFDLESYDYHLPKELIANYPVLPKEKAKLLVYERRSQTITHTTFEHVLDFFPKNALVVLNDTKVIKARLFGSKHAFLPSKTTEVFFHRFFKGNTALTQIKGKIKVGDKIFFDANYYAEVLELLHNGQRLIAFYDNQTPLNQENILKLLEQYGHMPYLLILKERMKVWMRMNTRACSLNTSARWLPLRRHCIFLKMP

SEQ ID NO: 7788 - protein, 198 aa, Helicobacter pylori; identical to SEQ ID NO: 7787
  misc_feature (B) LOCATION 1...198
  hypothetical: YES

SEQ ID NO: 7789 - protein, 209 aa, Helicobacter pylori
  misc_feature (B) LOCATION 1...209
  hypothetical: YES
QSNPLKSRKYLKAFRAIRAYALPPYIKRADESLDAHEYQSVFAKHIGAVAAPTASLHFSQNALEKLLKDFKHAFLTLHVGAGTFLSVETKDIREHQIHTEVLHIPKKSQEILQESQEVLCIGTTALRSVEYFKRLKNPNQESFECDIFLHLANPIQHVNHLLTNFHLPKSSLLMLVSAMIGLEKTKEIYKIAIEKKYRFYSYGDGMLIL

SEQ ID NO: 7790 - protein, 345 aa, Helicobacter pylori
  misc_feature (B) LOCATION 1...345
  hypothetical: YES
LKEFDLESYDYHLPKELIANYPVLPKEKAKLLVYERRSQTITHTTFEHVLDFFPKNALVVLNDTKVIKARLFGSKHAFLPSKTTEVFFHRFFKGNTALTQIKGKIKVGDKIFFDANYYAEVLELLHNGQRLIAFYDNQTPLNQENILKLLEQYGHMPLPPYIKRADESLDAHEYQSVFAKHIGAVAAPTASLHFSQNALEKLLKDFKHAFLTLHVGAGTFLSVETKDIREHQIHTEVLHIPKKSQEILQESQEVLCIGTTALRSVEYFKRLKNPNQESFECDIFLHLANPIQHVNHLLTNFHLPKSSLLMLVSAMIGLEKTKEIYKIAIEKKYRFYSYGDGMLIL

SEQ ID NO: 7791 - protein, 104 aa, Helicobacter pylori
  misc_feature (B) LOCATION 1...104
  hypothetical: YES
MTKKIEEKIEGVIESLGYLLYDVSLVKENEQHVLRVSLKNPNGAVSLDICQQVSEIISPLLDVCDFIQDAYILEVSSMGLERTLKTPKHFKLSLGRKSGSQTHQ

SEQ ID NO: 7792 - protein, 112 aa, Helicobacter pylori
  misc_feature (B) LOCATION 1...112
  hypothetical: YES
MKSLKGKIMTKKIEEKIEGVIESLGYLLYDVSLVKENEQHVLRVSLKNPNGAVSLDICQQVSEIISPLLDVCDFIQDAYILEVSSMGLERTLKTPKHFKLSLGRKSGSQTHQ

SEQ ID NO: 7793 - protein, 116 aa, Helicobacter pylori
  misc_feature (B) LOCATION 1...116
  hypothetical: YES
TPYSMKSLKGKIMTKKIEEKIEGVIESLGYLLYDVSLVKENEQHVLRVSLKNPNGAVSLDICQQVSEIISPLLDVCDFIQDAYILEVSSMGLERTLKTPKHFKLSLGRKSGSQTHQ

SEQ ID NO: 7794 - protein, 315 aa, Helicobacter pylori
  misc_feature (B) LOCATION 1...315
  hypothetical: YES
KNGLQVVSVPLENKTGVIEVDVLYKVGSRNEVMGKSGIAHMLEHLNFKSTKNLKAGEFDKIVKRFGGVSNASTSFDITRYFIKTSEANLDKSLELFAETMGSLNLKEDEFLPERQRWVAEERRWRTDNSPIGMLYFRFFNTVMSITPTMDAIGFMDDIQNWTLKTLKFIRSIISLKCYRFSGGDVNSQKVFELTKKHFESLKNLDEKAIPTPYMKEPKQDGARTAVVHKDGVHLEWVALGYKVPAFKHKDQVALDALSKLLGEGKSSWLQSELVDKKRLASQAFSHNMQLQDESVFLFIAGVILISKLKPYKKKS

SEQ ID NO: 7795 - protein, 314 aa, Helicobacter pylori
  misc_feature (B) LOCATION 1...314
  hypothetical: YES
NGLQVVSVPLENKTGVIEVDVLYKVGSRNEVMGKSGIAHMLEHLNFKSTKNLKAGEFDKIVKRFGGVSNASTSFDITRYFIKTSEANLDKSLELFAETMGSLNLKEDEFLPERQRWVAEERRWRTDNSPIGMLYFRFFNTVMSITPTMDAIGFMDDIQNWTLKTLKFIRSIISLKCYRFSGGDVNSQKVFELTKKHFESLKNLDEKAIPTPYMKEPKQDGARTAVVHKDGVHLEWVALGYKVPAFKHKDQVALDALSKLLGEGKSSWLQSELVDKKRLASQAFSHNMQLQDESVFLFIAGVILISKLKPYKKKS

SEQ ID NO: 7796 - protein, 402 aa, Helicobacter pylori
  misc_feature (B) LOCATION 1...402
  hypothetical: YES
LQVVSVPLENKTGVIEVDVLYKVGSRNEVMGKSGIAHMLEHLNFKSTKNLKAGEFDKIVKRFGGVSNASTSFDITRYFIKTSEANLDKSLELFAETMGSLNLKEDEFLPERQVVAEERRWRTDNSPIGMLYFRFFNTVMSITPTMDAIGFMDDIQNWTLKDIKKFHSLYYQPKNAIVLVVGDVNSQKVFELTKKHFESLKNLDEKAIPTPYMKEPKQDGARTAVVHKDGVHLEWVALGYKVPAFKHKDQVALDALSKLLGEGKSSWLQSELVDKKRLASQAFSHNMQLQDESVFLFIAGGNPNIKAEALQKEIVALLEKLKKGEITQAELDKIKINQKADFISNLESSSDVAGLFADYLVQNDLQGLTDYQQQFLDLKVSDLVRVANEYFKDTQSTTVFLKP

SEQ ID NO: 7797 - protein, 73 aa, Helicobacter pylori
  misc_feature (B) LOCATION 1...73
  hypothetical: YES
NLGVKQHLHSHCVAFVVGAQETAKRMQKIGGGAIVSLSSTGNLVYMPNYAGHGNSKTAVEDHGQIRCRGFRRI

SEQ ID NO: 7798 - protein, 89 aa, Helicobacter pylori
  misc_feature (B) LOCATION 1...89
  hypothetical: YES
KTMVKYAAVDLGEFNIRVNAVSGGPIDTDALKAFPDYVEIKEKVEEQSPLKRMGNPNDLAGAAYFLCDETQSGWLTGQTIVVDGGTTFK

SEQ ID NO: 7799 - protein, 120 aa, Helicobacter pylori
  misc_feature (B) LOCATION 1...120
  hypothetical: YES
GNCMNGSNHMKNKTLVISGTTRGIGKAILYRFAQSGVNIAFTYNKNVEEANKIIEDVEQKYSIKAKAYPLNVLEPEQYTELFKQVDADFDRVDFFISNAIIYGRSVVGGFAPSMRLKPRG

SEQ ID NO: 7800 - protein, 262 aa, Helicobacter pylori
  misc_feature (B) LOCATION 1...262
  hypothetical: YES
MNGSNHMKNKTLVISGATRGIGKAILYRFAQSGVNIAFTYNKNVEEANKIIEDVEQKYSIKAKAYPLNVLEPEQYTELFKQVDADFDRVDFFISNAIIYGRSVVGGFAPFMRLKPKGLNNIYTATVLAFVVGAQEAAKRMQKIGGGAIVSLSSTGNLVYMPNYAGHGNSKNAVETMVKYAAVDLGEFNIRVNAVSGGPIDTDALKAFPDYVEIKEKVEEQSPLKRMGNPNDLAGAAYFLCDETQSGWLTGQTIVVDGGTTFK

SEQ ID NO: 7801 - protein, 182 aa, Helicobacter pylori
  misc_feature (B) LOCATION 1...182
  hypothetical: YES
MDLEQAFLKIIEKKHKELNLGQDYNAIFSKIRDFEANAIGQIGEEFLKSVLNAIDEVINDGIIHDEYDIMTKSGVSFEVKTAQKGRTNNTFQFNGINPRYNYDFLICLGVCEDQLLYRIFKKDEIHYIHKERKYFMKQNEFKKQLVPMNPDNQVNDKLTLNLKELKEITNLIKELERILELD

SEQ ID NO: 7802 - protein, 183 aa, Helicobacter pylori
  misc_feature (B) LOCATION 1...183
  hypothetical: YES
LMDLEQAFLKIIEKKHKELNLGQDYNAIFSKIRDFEANAIGQIGEEFLKSVLNAIDEVINDGIIHDEYDIMTKSGVSFEVKTAQKGRTNNTFQFNGINPRYNYDFLICLGVCEDQLLYRIFKKDEIHYIHKERKYFMKQNEFKKQLVPMNPDNQVNDKLTLNLKELKEITNLIKELERILELD

SEQ ID NO: 7803 - protein, 104 aa, Helicobacter pylori
  misc_feature (B) LOCATION 1...104
  hypothetical: YES
SVIKMRCFKAIVAYDGAYFLGYAKQPNKLGVQDKIESALNALGIKSGVIAAGRTDKGVHANNQALSFHAPKHWNAAKLFHYLAPKLAPAHCLKKARRKKLPCAF

SEQ ID NO: 7804 - protein, 164 aa, Helicobacter pylori
  misc_feature (B) LOCATION 1...164
  hypothetical: YES
PPNSPPHIVLKKLEEKNFHARFDAQKRAYRYLLTKNLKTPFLAPYIACGDYGSLDALNIALKQFIGKHDFSMFKKEGGATTNPNRIIFNALAYKTFIMGHECVVFKIIGDAFLRSSVRLIIQACVQYSLEKITLAEIQAQIHNLKATIRTPIMANGLYLHRVYY

SEQ ID NO: 7805 - protein, 242 aa, Helicobacter pylori
  misc_feature (B) LOCATION 1...242
  hypothetical: YES
MRCFKAIVAYDGAYFLGYAKQPNKLGVQDKIESALNALGIKSGVIAAGRTDKGVHANNQALSFHAPKHWNAAKLFHYLAPKLAPHIVLKKLEEKNFHARFDAQKRAYRYLLTKNLKTPFLAPYIACGDYGSLDALNIALKQFIGKHDFSMFKKEGGATTNPNRIIFNALAYKTFIMGHECVVFKIIGDAFLRSSVRLIIQACVQYSLEKITLAEIQAQIHNLKATIRTPIMANGLYLHRVYY

SEQ ID NO: 7806 - protein, 378 aa, Helicobacter pylori
  misc_feature (B) LOCATION 1...378
  hypothetical: YES
LKKFAYSEPCLDEEDKKAVLEVLNSKQLTQGKYSLLFEEALCEFLGVKHALAFNSATSALLTLYRNFSDFNADRNEIITTPISFVATANMLLESGYTPVFAEVKNDGNIDELALEKLITKKTKAIVSVDYAGKSVEIESIQRLCKKYSLSFLSDSSHALGSEYQNKKVGGFALASVFSFHAIKPITTAEGGAVVTNNSELYEKMKLFRSHGMLKKDFFEGEVKSVGYNFRLNEIQSALGLSQLKKAPLLRQKREEVALIYDEIFKDNPYFTPLHPLLKHQSSNHLYPILMHQKFFTCKKLILESLHKLGILVQVHYKPIYQYQLYQQLFNTAPLKSAEDFYSAEISLPCHANLDLESVQNIAHGVLKTFEGFNRMGFI

SEQ ID NO: 7807 - protein, 392 aa, Helicobacter pylori
  misc_feature (B) LOCATION 1...392
  hypothetical: YES
HKQNHPISLARLARLKKFAYSEPCLDEEDKKAVLEVLNSKQLTQGKYSLLFEEALCEFLGVKHALAFNSATSALLTLYRNFSDFNADRNEIITTPISFVATANMLLESGYTPVFAEVKNDGNIDELALEKLITKKTKAIVSVDYAGKSVEIESIQRLCKKYSLSFLSDSSHALGSEYQNKKVGGFALASVFSFHAIKPITTAEGGAVVTNNSELYEKMKLFRSHGMLKKDFFEGEVKSVGYNFRLNEIQSALGLSQLKKAPLLRQKREEVALIYDEIFKDNPYFTPLHPLLKHQSSNHLYPILMHQKFFTCKKLILESLHKLGILVQVHYKPIYQYQLYQQLFNTAPLKSAEDFYSAEISLPCHANLDLESVQNIAHGVLKTFEGFNRMGFI

SEQ ID NO: 7808 - protein, 116 aa, Helicobacter pylori
  misc_feature (B) LOCATION 1...116
  hypothetical: YES
NTTAHPTQFLNKLNEFKSDVFTTPKAKEYIDIASGFHKLFKNDAKIAESLKPAITKNLSQGLATTLSGALKYQWTKFTLGTLYRNAPDRILGVKLPKALNEATAGAALKYHLKKSA

SEQ ID NO: 7809 - protein, 134 aa, Helicobacter pylori
  misc_feature (B) LOCATION 1...134
  hypothetical: YES
AVEYIQKNHKRIAVEKIEPSFAKDLKLKYPDDARAVMDYQAINHILKEHKNLAYEDIANYRELSKQANETLKLKDNQNRPVVASFNQINGFFVVVEQVSNAKNELMLKTMYKARGNYKDSLIYKKTLAKSQNSN

SEQ ID NO: 7810 - protein, 143 aa, Helicobacter pylori
  misc_feature (B) LOCATION 1...143
  hypothetical: YES
PNKIKQGTSETEAKDYAINVIKTIPEVIDKGVKVERNGRVAIEYQNIRVGLKDNWKGEKSPNHWVITGYEKRLEDSESLYTSPPITKGETLPLNSNKPDPTTNAIKTQEPLYPLELANAEKLAKPRKTIQKVRTNKRTSQRKD

SEQ ID NO: 7811 - protein, 229 aa, Helicobacter pylori
  misc_feature (B) LOCATION 1...229
  hypothetical: YES
IFTQNNKKMIIEKASNKELELLKDANFKHPENIRASLDHDAIAHILKRHGVNSVNVKNGESPITYEDIANYRYIVNNADAILRTLDNEDKEVISAFKQINGYAVVVEQAINKKNELVLKTMYKSNGDYKDNNAYKKFSSTLTLNADAKVNHGLSSHSGATENLTQKPLTSQEDLLKDTENLNETTPKPTHLSPVELANAEKLAKLESEAKVSEQEFLKAKEQEQSAKLR

SEQ ID NO: 7812 - protein, 701 aa, Helicobacter pylori
  misc_feature (B) LOCATION 1...701
  hypothetical: YES
VIAGNHRIQGMLNFTPKSRYIYNKAIKEYYHIDLEPDELLVRVPNKRLDNTEINNLAASSNQGRFNSESDHAIAVLSHYEAKLKELEKKLDADSIYSLKNIVANNLNFDKATHPNVGDSNLALLMFNMPRTKTQGIELLNCWQKAFSNDIKSYEKVKKMFVDNAGSFHNLIHDMNFPNVSLNAYLSDIMDRSFANLKNYQSTSESLKDLSEKFYKTSSLDMFEKSDQRASDISEILGGAIARFARFDDPSKALFEALKSDNIKKGLKEFKIADVTKDMFDPKSKEFKDIDIYDFTHYLLMVNREPNENNPVLKRLIQAVKDMQKEKKKGIKKPKLETPSEWGHHYSEFKGDGLGAINKLLKTKKGFVAGAFYKEGLGDIDLVWGNKDYGLEHILKRREDQALNNGINEAEAKDYAISVIKTIPEVIDKGVKVERNGRVAIEYQNIRVGLKDNWKGEKSPNHWVITGYEKRLEDSESLYTSPPITKGETLPLNSNKPDPTTNAIKTQEPLYPLELANAEKLAKLETEKAFKAEAVKKLDFNEIKKLIDESPRTGSSMPILGMQNLNAEAVEYIQKNHKRIAVEKIEPSFAKDLKLKYPDDARAVMDYQAINHILKEHKNLAYEDIANYRELSKQANETLKLKDNQNRPVVASFNQINGFFVVVEQVSNAKNELMLKTMYKARGNYKDSLIYKKTLAKSQNSN

SEQ ID NO: 7813 - protein, 1221 aa, Helicobacter pylori
  misc_feature (B) LOCATION 1...1221
  hypothetical: YES
TYKLQTIASGFHKLFKNDAKIAESLKPATTKNLSQGLATTLSGALKYQWTKFTLGTLYRNAPDRILGVKLPKALNEATAGAALKYHIKRALERSHLISDFSKNLELSAKNSKFTNNTLKIIEELNNGVKQASEEIKEKAFDFSNEKLTNEQIKELLNNAKIPTSGRDAITFGTNNLNPEMVEFLHKNNKKMIIEKASNKELELLKDANFKHPENIRASLDHDAIAHILKRHGVNSVNVKNGESPITYEDIANYRYIVNNADAILRTLDNEDKEVISAFKQINGYAVVVEQAINKKNELVLKTMYKSNGDYKDNNAYKKFSSTLTLNADAKVNHGLSSHSGATENLTQKPLTSQEDLLKDTENLNETTPKPTHLSPLELANAEKLAKLESEQLQSEQEFLKAKEQELKRKEALKKKLEHERGNAGHIESQTKIEVGEDIPTQVQAQIPKSRVRLNEREIYDLDYAIVKAKDLKPSFTTGGTQKRTDMNEEQIKSIAENFDPKKIFGSGGFEDLPIILHDGQVIAGNHRIQGMLNFTPKSRYIYNKAIKEYYHIDLEPDELLVRVPNKRLDNTEINNLAASSNQGRFNSESDHAIAVLSHYEAKLKELEKKLDADSIYSLKNIVANNLNFDKATHPNVGDSNLALLMFNMPRTKTQGIELLNCWQKAFSNDIKSYEKVKKMFVDNAGSFHNLIHDMNFPNVSLNAYLSDIMDRSFANLKNYQSTSESLKDLSEKFYKTSSLDMFEKSDQRASDISEILGGAIARFARFDDPSKALFEALKSDNIKKGLKEFKIADVTKDMFDPKSKEFKDIDIYDFTHYLLMVNREPNENNPVLKRLIQAVKDMQKEKKKGIKKPKLETPSEWGHHYSEFKGDGLGAINKLLKTKKGFVAGAFYKEGLGDIDLVWGNKDYGLEHILKRREDQALNNGINEAEAKDYAISVIKTIPEVIDKGVKVERNGRVAIEYQNIRVGLKDNWKGEKSPNHWVITGYEKRLEDSESLYTSPPITKGETLPLNSNKPDPTTNAIKTQEPLYPLELANAEKLAKLETEKAFKAEAVKKLDFNEIKKLIDESPRTGSSMPILGMQNLNAEAVEYIQKNHKRIAVEKIEPSFAKDLKLKYPDDARAVMDYQAINHILKEHKNLAYEDIANYRELSKQANETLKLKDNQNRPVVASFNQINGFFVVVEQVSNAKNELMLKTMYKARGNYKDSLIYKKTLAKSQNSN

SEQ ID NO: 7814 - protein, 126 aa, Helicobacter pylori
  misc_feature (B) LOCATION 1...126
  hypothetical: YES
KSEFSWYKNRHKEPFSEYIKVFTVSLAKNRECGKEWIFNQKASFYISSTFYKSTQIVENFEEVKYQSGIAVVFTSADKVLNAKLKKLFQEIDWTKYASLATNSCYHLGKSHIFQALHDHLDSLKGN

SEQ ID NO: 7815 - protein, 177 aa, Helicobacter pylori
  misc_feature (B) LOCATION 1...177
  hypothetical: YES
IFFMQTLFKEITSKCYVNGNEMKENSSNVLDQYFTKPSVALKCFQKACEVIKKYENPDDFIFFRTKCRGDGVFYDLFPKDRRIGIDIEPKRDGFIQCDFLNYKLPVHQKVICLGNPPFGHRGVMALEFINHARNCDFVCFILPMFFESQGKGSIKYRVKGLNLLYSEALRKKCVYRF

SEQ ID NO: 7816 - protein, 320 aa, Helicobacter pylori
  misc_feature (B) LOCATION 1...320
  hypothetical: YES
MQTLFKEITSKCYVNGNEMKENSSNVLDQYFTKPSVALKCFQKACEVIKKYENPDDFIFLEPSAGDGVFYDLFPKDRRIGIDIEPKRDGFIQCDFLNYKLPVHQKVICLGNPPFGHRGVMALEFINHARNCDFVCFILPMFFESQGKGSIKYRVKGLNLLYSERLEKNAFIDFKNKEVDVHCVFQIWSKKYQNKKSEFSWYKNRHKEPFSEYIKVFTVSLAKNRECGKEWIFNQKASFYISSTFYKSTQIVENFEEVKYQSGIAVVFTSADKVLNAKLKKLFQEIDWTKYASLATNSCYHLGKSHIFQALHDHLDSLKGN

SEQ ID NO: 7817 - protein, 201 aa, Helicobacter pylori
  misc_feature (B) LOCATION 1...201
  hypothetical: YES
MSKISNHYNPSLTMRDYHSQRVSPHARKEENKEIQNLSENDEKIKLAKQAKQDNLAIGDLESRLKSLKGMDKDAKELVGISKSYAHNNEKDRSDFERFKSRLDKAIDSFNQNLDNGAASLKLPSDIDIDDTKALEKFSKSLESEKESIQNSLHQWKKQLAETNHLNKEYNTLDKTRLNAQKFQDVHDTSKITPSRLQDLLA

SEQ ID NO: 7818 - protein, 217 aa, Helicobacter pylori
  misc_feature (B) LOCATION 1...217
  hypothetical: YES
SLLVLSLRKSNEMEDRMSKISNHYNPSLTMRDYHSQRVSPHARKEENKEIQNLSENDEKIKLAKQAKQDNLAIGDLESRLKSLKGMDKDAKELVGISKSYAHNNEKDRSDFERFKSRLDKAIDSFNQNLDNGAASLKLPSDIDIDDTKALEKFSKSLESEKESIQNSLHQWKKQLAETNHLNKEYNTLDKTRLNAQKFQDVHDTSKITPSRLQDLLA

SEQ ID NO: 7819 - protein, 126 aa, Helicobacter pylori
  misc_feature (B) LOCATION 1...126
  hypothetical: YES
MLPTKTRIRDPNKQELTQPKIKGLSMGKILASLLGGGTNLFTGLSSDLFSMILNFLFFLMLMMGLNEALGKKFNLPMDNIKNFMAEVLKNGFDSIKNMGSALVGNGFGSSKSDKTTNKMSVPQVRL

SEQ ID NO: 7820 - protein, 126 aa, Helicobacter pylori; identical to SEQ ID NO: 7819
  misc_feature (B) LOCATION 1...126
  hypothetical: YES

SEQ ID NO: 7821 - protein, 131 aa, Helicobacter pylori
  misc_feature (B) LOCATION 1...131
  hypothetical: YES
VCYCEMLPTKTRIRDPNKQELTQPKIKGLSMGKILASLLGGGTNLFTGLSSDLFSMILNFLFFLMLMMGLNEALGKKFNLPMDNIKNFMAEVLKNGFDSIKNMGSALVGNGFGSSKSDKTTNKMSVPQVRL

SEQ ID NO: 7822 - protein, 59 aa, Helicobacter pylori
  misc_feature (B) LOCATION 1...59
  hypothetical: YES
LFGGKIFDLFAIGGYLSLDFMSNLRFKNFVSSFRYAIVKCFLLKHALEIRTSKNLHNQK

SEQ ID NO: 7823 - protein, 65 aa, Helicobacter pylori
  misc_feature (B) LOCATION 1...65
  hypothetical: YES
KQKGYGLFGGKIFDLFAIGGYLSLDFMSNLRFKNFVSSFRYAIVKCFLLKHALEIRTSKNLHNQK

SEQ ID NO: 7824 - protein, 63 aa, Helicobacter pylori
  misc_feature (B) LOCATION 1...63
  hypothetical: YES
LCENFRAVIIQRARNHFLTIRYCFNHSYIYFSKPTKNAFINSPKNRFKKVLILYIIFKKQDQS

SEQ ID NO: 7825 - protein, 112 aa, Helicobacter pylori
  misc_feature (B) LOCATION 1...112
  hypothetical: YES
PGALPVLNKEVVKKAIQLGTAIEAHINQYSIFARKNYFYPDLPKAYQISQFEVPIVSDGKLEIDTKEGAKIVRIERAHMEEDAGKNIHEGSYSLGGLESRLHPRASIRPSGW

SEQ ID NO: 7826 - protein, 113 aa, Helicobacter pylori
  misc_feature (B) LOCATION 1...113
  hypothetical: YES
RIAGLALMRRRLAKRIDEGKISGKSAKDVLDRLLEEQGGDVDTPIEQMGLSQVNDTEAIVKVIEEVLKNNADKVLEYKSGKDKLFGFFVGQAMKNLKGANPSVVNAILKEKLD

SEQ ID NO: 7827 - protein, 162 aa, Helicobacter pylori
  misc_feature (B) LOCATION 1...162
  hypothetical: YES
NSFRFIAKAIEYEIERQSVAWENGRYNEEVVQETRLFDTAKGITLSMRNKEESADYRYFKDPDLYPVFIDEKLLKEAQKINELPGAKKIRYMKDFNLKEDDANLLVSDPLLAEYFESMLNLGVKAKTSVTWLCVELLGRLKAEVTLENCGISAHAQALSQTH

SEQ ID NO: 7828 - protein, 161 aa, Helicobacter pylori
  misc_feature (B) LOCATION 1...161
  hypothetical: YES
SFRFIAKAIEYEIERQSVAWENGRYNEEVVQETRLFDTAKGITLSMRNKEESADYRYFKDPDLYPVFIDEKLLKEAQKINELPGAKKIRYMKDFNLKEDDANLLVSDPLLAEYFESMLNLGVKAKTSVTWLCVELLGRLKAEVTLENCGISAHAQALSQTH

SEQ ID NO: 7829 - protein, 463 aa, Helicobacter pylori
  misc_feature (B) LOCATION 1...463
  hypothetical: YES
MSNSTLKPKIFCSCSTSFGETPNSNTCPVCLGLPGALPVLNKEVVKKAIQLGTAIEAHINQYSIFARKNYFYPDLPKAYQISQFEVPIVSDGKLEIDTKEGAKIVRIERAHMEEDAGKNIHEGSYSLVDLNRACTPLLEIVSKPDMKNSEEAIAYLKKLHAIVRFIGISDANMQEGNFRCDANVSIRPKGDEKLYTRVEIKNLNSFRFIAKAIEYEIERQSVAWENGRYNEEVVQETRLFDTAKGITLSMRNKEESADYRYFKDPDLYPVFIDEKLLKEAQKINELPGAKKIRYMKDFNLKEDDANLLVSDPLLAEYFESMLNLGVKAKTSVTWLCVELLGRLKAEVTLENCGISAHALGALAKRIDEGKISGKSAKDVLDRLLEEQGGDVDTLIEQMGLSQVNDTEAIVKVIEEVLKNNADKVLEYKSGKDKLFGFFVGQAMKNLKGANPSVVNAILKEKLD

SEQ ID NO: 7830 - protein, 243 aa, Helicobacter pylori
  misc_feature (B) LOCATION 1...243
  hypothetical: YES
MKDTLFNESLNKRFCFDEKVAHVFDDMLERSIPYYHEMLNLGAYFIAQNLKENVYHKSLPKPLIYDLGCSTGNFFIALNQQIQQDIELVGIDNSMPMLKKAQEKLKDFNNVRFECMDFLEVKFKEASAFSLLFVLQFVRPMQREVLLKKIYNSLALNGVLLVGEKIMSEDRILDKQMIELYYLYKQNQGYSHNEIAFKREALENVLVPYSLKENIALLESVGFKHVEALFKWVNFTLLVARKT

SEQ ID NO: 7831 - protein, 243 aa, Helicobacter pylori; identical to SEQ ID NO: 7830
  misc_feature (B) LOCATION 1...243
  hypothetical: YES

SEQ ID NO: 7832 - protein, 75 aa, Helicobacter pylori
  misc_feature (B) LOCATION 1...75
  hypothetical: YES
MQSLSLLNQLGAKIDELIEKIQKQEEELSALRQANTTLNAQNEEKDIQIAILYDELSAKDKGIQGLYDKISDLLS

SEQ ID NO: 7833 - protein, 84 aa, Helicobacter pylori
  misc_feature (B) LOCATION 1...84
  hypothetical: YES
LLKTIERLMMQSLSLLNQLGAKIDELIEKIQKQEEELSALRQANTTLNAQNEEKDIQIAILYDELSAKDKGIQGLYDKISDLLS

SEQ ID NO: 7834 - protein, 185 aa, Helicobacter pylori
  misc_feature (B) LOCATION 1...185
  hypothetical: YES
VQQNEQEVEDKEKESKEPVVLEDLSALAWLELEEFSRLSELPKERILELVNIGKIKSKISHNKLLIDASSGTNALIKKVENNLISMDMNGRSLEPVFVEKTINTILNLHDKVISAKDETISAFKNENMFLKDALISMQEVYEEDKKTIDLLHDELNQAREEIEFMKRKYRLMWGKVADMSSVNKK

SEQ ID NO: 7835 - protein, 185 aa, Helicobacter pylori
  misc_feature (B) LOCATION 1...185
  hypothetical: YES
VKTNEQEVEDKEKESKEPVVLEDLSALAWLELEEFSRLSELPKERILELVNIGKIKSKISHNKLLIDASSGTNALIKKVENNLISMDMNGRSLEPVFVEKTINTILNLHDKVISAKDETISAFKNENMFLKDALISMQEVYEEDKKTIDLLHDELNQAREEIEFMKRKYRLMWGKVADMSSVNKK

SEQ ID NO: 7836 - protein, 186 aa, Helicobacter pylori
  misc_feature (B) LOCATION 1...186
  hypothetical: YES
AVQQNEQEVEDKEKESKEPVVLEDLSALAWLELEEFSRLSELPKERILELVNIGKIKSKISHNKLLIDASSGTNALIKKVENNLISMDMNGRSLEPVVVEKTINTILNLHDKVISAKDETISAFKNENMFLKDALISMQEVYEEDKKTIDLLHDELNQAREEIEFMKRKYRLMWGKVADMSSVNKK

SEQ ID NO: 7837 - protein, 315 aa, Helicobacter pylori
  misc_feature (B) LOCATION 1...315
  hypothetical: YES
MLFAMIGSGGFIAPKHLQAIRDTGHFLDCSFDVHDSVGVLDEYFPQSEFFTNIEDFEKHLEQSKAMGKEINYLSVCTPTHTHFDHIRFGLRNGMHVICEKPLVLDPSEIQELKDLEVKYQKRVFSLLPLRLHCDTLALKEKIKSELDKNPEKVFDITLTYISVQGKWYFSSWRADVNRSGGLATQMGVNIFDTLLYLFGGVKDKVINREEPDCVCGILFLEHAKIRWFFSINPEHMGVAKEKVYHKMILEGEEVNLTQSFDNLYIESYKQILAQGGFGLDDAAASIKLAYELRNLSLSEPNDDSHALCCKNKTDQ

SEQ ID NO: 7838 - protein, 315 aa, Helicobacter pylori; identical to SEQ ID NO: 7837
  misc_feature (B) LOCATION 1...315
  hypothetical: YES

SEQ ID NO: 7839 - protein, 104 aa, Helicobacter pylori
  misc_feature (B) LOCATION 1...104
  hypothetical: YES
MNVFEKIIQGEIPCSKILENERFLSFYDINPKAKVHALVIPKQSIQDFNGITPELMAQMTSFIFEVVEKLGIKEKGYKLLTNVGKNAGQEVMHLHFHILSGDKH

SEQ ID NO: 7840 - protein, 119 aa, Helicobacter pylori
  misc_feature (B) LOCATION 1...119
  hypothetical: YES
YNFNKRKTLKGSKKSMNVFEKIIQGEIPCSKILENERFLSFYDINPKAKVHALVIPKQSIQDFNGITPELMAQMTSFIFEVVEKLGIKEKGYKLLTNVGKNAGQEVMHLHFHILSGDKH

SEQ ID NO: 7841 - protein, 54 aa, Helicobacter pylori
  misc_feature (B) LOCATION 1...54
  hypothetical: YES
NGLFSPFGQRIRRISWKDVEPASFSASNSINKENITGTTRIENDKTLLILDLGS

SEQ ID NO: 7842 - protein, 59 aa, Helicobacter pylori
  misc_feature (B) LOCATION 1...59
  hypothetical: YES
NHLKIRTPNMAEKTANDLKLSEIELVDFRIYGMQEGVPYEGIYGINVAKVQEIIPMPTL

SEQ ID NO: 7843 - protein, 65 aa, Helicobacter pylori
  misc_feature (B) LOCATION 1...65
  hypothetical: YES
IRFRKHLRRFKLNEDAKSTKEDIPKERFEGEVLFLDDSRTARKTLKNHLSKLGFSITEAVMGKTG

SEQ ID NO: 7844 - protein, 64 aa, Helicobacter pylori
  misc_feature (B) LOCATION 1...64
  hypothetical: YES
RFRKHLRRFKLNEDAKSTKEDIPKERFEGEVLFLDDSRTARKTLKNHLSKLGFSITEAVMGKTG

SEQ ID NO: 7845 - protein, 89 aa, Helicobacter pylori
  misc_feature (B) LOCATION 1...89
  hypothetical: YES
FELHDHSAYSLAKWIGIVPDKSKENERIVIITEFNNVKMGFLVHSASASGALAGKMWSLHPLAPLIASIKKISPAPRALKTTKPCSFWI

SEQ ID NO: 7846 - protein, 217 aa, Helicobacter pylori
  misc_feature (B) LOCATION 1...217
  hypothetical: YES
MAEKTANDLKLSEIELVDFRIYGMQEGVPYEGIYGINVAKVQEIIPMPTLFEYPTNLDYIIGVFDLRSTIIPLIDLAKWIGIVPDKSKENERIVIITEFNNVKMGFLVHSARRIRRISWKDVEPASFSASNSINKENITGTTRIENDKTLLILDLESILDDLKLNEDAKSTKEDTPKERFEGEVLFLDDSRTARKTLKNHLSKLGFSITEAVMGKTG

SEQ ID NO: 7847 - protein, 141 aa, Helicobacter pylori
  misc_feature (B) LOCATION 1...141
  hypothetical: YES
GTLEHVGKGNLPFYFKKVKEVLKRGGMFLLHSILCCFEGKTNAWVDKYIFPGGYLPSLREVMSVMSECDFHLLMAESLRIHYAKTLDIWRDNFNHNLDQVKRLGYDERFIRMWDLYVRTCASAFRVEECGFIPIALNQQRG

SEQ ID NO: 7848 - protein, 147 aa, Helicobacter pylori
  misc_feature (B) LOCATION 1...147
  hypothetical: YES
LALKKLKNELRNRQMISKFLLKSMFKQWKNGDYQVVFWDNSVYRNGEHSPKFTLKIHRPLKFSDIKKDMSLTIAEAYMDGVIDIEGSMDEVMHSLYLQTNYEHLHKHDSAKAVQKPLKESSNISKHYDLGNDFYSIWLDETLSYSCA

SEQ ID NO: 7849 - protein, 222 aa, Helicobacter pylori
  misc_feature (B) LOCATION 1...222
  hypothetical: YES
MISKFLLKSMFKQWKNGDYQVVFWDNSVYRNGEHSPKFTLKIHRPLKFSDIKKDMSLTIAEAYMDGVIDIEGSMDEVMHSLYLQTNYEHLHKHDSAKAVQKPLKESSNISKHYDLGNDFYSIWLDETLSYSCAYFKKDDDTLHAAQLQKLDHTLKKLHLKQGEKLLDIGCGWGYLSIKAAQEYGAEVMGITISSEQYKQANKRVQELGLEDNVTINIELPGS

SEQ ID NO: 7850 - protein, 389 aa, Helicobacter pylori
  misc_feature (B) LOCATION 1...389
  hypothetical: YES
MISKFLLKSMFKQWKNGDYQVVFWDNSVYRNGEHSPKFTLKIHRPLKFSDIKKDMSLTIAEAYMDGVIDIEGSMDEVMHSLYLQTNYEHLHKHDSAKAVQKPLKESSNISKHYDLGNDFYSIWLDETLSYSCAYFKKDDDTLHAAQLQKLDHTLKKLHLKQGEKLLDIGCGWGYLSIKAAQEYGAEVMGITISSEQYKQANKRVQELGLEDKVTIKLLNYQDLDGRLYRFDKVVSVGMFEHVGKDNLPFYFKKVKEVLKRGGMFLLHSILCCFEGKTNAWVDKYIFPGGYLPSLREVMSVMSECDFHLLMAESLRIHYAKTLDIWRDNFNHNLDQVKRLGYDERFIRMWDLYLRTCASAFRVGSADLFQLLLTNSVDNTFPLTKEYIYQ

SEQ ID NO: 7851 - protein, 398 aa, Helicobacter pylori
  misc_feature (B) LOCATION 1...398
  hypothetical: YES
LKNELRNRQMISKFLLKSMFKQWKNGDYQVVFWDNSVYRNGEHSPKFTLKIHRPLKFSDIKKDMSLTIAEAYMDGVIDIEGSMDEVMHSLYLQTNYEHLHKHDSAKAVQKPLKESSNISKHYDLGNDFYSIWLDETLSYSCAYFKKDDDTLHAAQLQKLDHTLKKLHLKQGEKLLDIGCGWGYLSIKAAQEYGAEVMGITISSEQYKQANKRVQELGLEDKVTIKLLNYQDLDGRLYRFDKVVSVGMFEHVGKDNLPFYFKKVKEVLKRGGMFLLHSILCCFEGKTNAWVDKYIFPGGYLPSLREVMSVMSECDFHLLMAESLRIHYAKTLDIWRDNFNHNLDQVKRLGYDERFIRMWDLYLRTCASAFRVGSADLFQLLLTNSVDNTFPLTKEYIYQ

SEQ ID NO: 7852 - protein, 110 aa, Helicobacter pylori
  misc_feature (B) LOCATION 1...110
  hypothetical: YES
LCDECTLTGFRPRMGEVAQYEHFELMRKADYVIGIVNEDSTTRGAEVQQSVFALKIDHDTIGTDEEGALKVEGVCAQKGSQEYEELVNKNTWHFTRSTRLGKPKLIKRKS

SEQ ID NO: 7853 - protein, 146 aa, Helicobacter pylori
  misc_feature (B) LOCATION 1...146
  hypothetical: YES
MAQLEDLKAHEKYNLLLCMVSGAYKGTIPGNEDFKELCDECTLTGFRPRMGEVAQYEHFELMRKADYVIGIVNEDSTTRGAEVQQSVFALKIDHDTIGTDEEGALKVEGVCAQKGSQEYEELVNKNTWHFTRSTRLGKPKLIKRKS

SEQ ID NO: 7854 - protein, 153 aa, Helicobacter pylori
  misc_feature (B) LOCATION 1...153
  hypothetical: YES
IQYKEKTMAQLEDLKAHEKYNLLLCMVSGAYKGTIPGNEDFKELCDECTLTGFRPRMGEVAQYEHFELMRKADYVIGIVNEDSTTRGAEVQQSVFALKIDHDTIGTDEEGALKVEGVCAQKGSQEYEELVNKNTWHFTRSTRLGKPKLIKRKS

SEQ ID NO: 7855 - protein, 120 aa, Helicobacter pylori
  misc_feature (B) LOCATION 1...120
  hypothetical: YES
SSNLYMSMSSWCYTHSLDGAGLFLFDHVAEEYEHAKKLIIFLNENNVPVQLTSISAPEHKFEGLTQIFQKAYEHEQHISESINNIVDHAIKSKDHATFNFLQWYVAEQHEEEVLFKDIFG

SEQ ID NO: 7856 - protein, 121 aa, Helicobacter pylori
  misc_feature (B) LOCATION 1...121
  hypothetical: YES
NSSNLYMSMSSWCYTHSLDGAGLFLFDHVAEEYEHAKKLIIFLNENNVPVQLTSISAPEHKFEGLTQIFQKAYEHEQHISESINNIVDHAIKSKDHATFNFLQWYVAEQHEEEVLFKDIFG

SEQ ID NO: 7857 - protein, 167 aa, Helicobacter pylori
  misc_feature (B) LOCATION 1...167
  hypothetical: YES
MLSKDIIKLLNEQVNKEMNSSNLYMSMSSWCYTHSLDGAGLFLFDHAAEEYEHAKKLIIFLNENNVPVQLTSISAPEHKFEGLTQIFQKAYEHEQHISESINNIVDHAIKSKDHATFNFLQWYVAEQHEEEVLFKDILDKIELIGNENHGLYLADQYVKGIAKSRKS

SEQ ID NO: 7858 - protein, 229 aa, Helicobacter pylori
  misc_feature (B) LOCATION 1...229
  hypothetical: YES
YVMDNKDSKDIAILCGTNIKTIFNTYGTSTKEVVLDIAQNNLKYLYEILQNLENDNMTDLGINIKITYKDISVNLDLKESLLVINALATKKIALRGSAYSMIGKRIEKPLMLELCKRCGISESHIDATNFKKDKKLEYDREVDFKLYNKDRSKVYRVEVKLMSKGNPESADAVIARDTDIFIAYTLSEQNKQQLEYLNIVYLALKNNSNIILDFKRLCKRLGIPLINHA

SEQ ID NO: 7859 - protein, 290 aa, Helicobacter pylori
  misc_feature (B) LOCATION 1...290
  hypothetical: YES
MNFNESVLNHTINLLLKGKDYREVVLNTINTEFLDFAISFFKDIVYAKMHDKSIDFSWYQQYVMDNKDPKDIAILCGTNIKTIFNTYGTSTKEVVLDIAQNNLKYLYEILQNLENDNMTDLGINIKITYKDISVNLDLKESLLVINALATKKIALRGSAYSMIGKRIEKPLMLELCKRCGISESHIDATNFKKDKKLEYDREVDFKLYNKDRSKVYRVEVKLMSKGNPESADAVIARDTDIFIAYTLSEQNKQQLEYLNIVYLALKNNSNIILDFKRLCKRLGIPLINHA

SEQ ID NO: 7860 - protein, 78 aa, Helicobacter pylori
  misc_feature (B) LOCATION 1...78
  hypothetical: YES
MSLENDSLEITYLGKRYKISLNNTFSDEMKRTLKERFHNQELNALELLKDYLHESCQNEYLHNELQKLLEKISSCSIT

SEQ ID NO: 7861 - protein, 82 aa, Helicobacter pylori
  misc_feature (B) LOCATION 1...82
  hypothetical: YES
TIKNMSLENDSLEITYLGKRYKISLNNTFSDEMKRTLKERFHNQELNALELLKDYLHESCQNEYLHNELQKLLEKISSCSIT

SEQ ID NO: 7862 - protein, 59 aa, Helicobacter pylori
  misc_feature (B) LOCATION 1...59
  hypothetical: YES
MEFNAHRKYDDANLDDEYDKIDELLFYLSYSSKVWNFLHTLEERLQPLFLMIIKSLRKK

SEQ ID NO: 7863 - protein, 143 aa, Helicobacter pylori
  misc_feature (B) LOCATION 1...143
  hypothetical: YES
MEFNAHRKYDDANLDDEYDKIDELLFYLSYSSKVWNFLHTLDEKATTLIFNDNKKLETEITPKTRTLLDKMRRLNALSDNAFLPLLLSLFTIQLEGKHANKQPYTTKELEGLLEYLERFGFLIYGVAGRDTAKNEWIGLDWLL

SEQ ID NO: 7864 - protein, 197 aa, Helicobacter pylori
  misc_feature (B) LOCATION 1...197
  hypothetical: YES
QKLETLQQEINDTYTIIYDDLRSFKDDDLERFLKHFVAYYYGENSNKFKERLLEMEFNAHRKYDDANLDDEYDKIDELLFYLSYSSKVWNFLHTLDEKATTLIFNDNKKLETEITPKTRTLLDKMRRLNALSDNAFLPLLLSLFTIQLEGKHANKQPYTTKELEGLLEYLERFGFLIYGVAGRDTAKNEWIGLDWLL

SEQ ID NO: 7865 - protein, 450 aa, Helicobacter pylori
  misc_feature (B) LOCATION 1...450
  hypothetical: YES
MQEISAYELIKEKLHAIPNQRHKGSLFEKISKQFLQEHDSANEYESIDLWYDWKLRGNERDKGIDIVITTSNKEYIAVQCKFHQNSISYNDISPFLTQLLSGVGGVKFKKGIIISTSNLTSEALKAIEQIRSTGMGIDIDEITEEDFIYSRIDWEKFDPTKTEDEIPLCDKKRPRPHQTEAIEKTKEYFSDPKNARGKLIMACGTGKTYTSLKIMESLDPKITLFLAPSIALLSQTFREYAQEKSEPFYASIVCSDDKTGQSKNEDNDDIKFSELPIKPSTRLEDILSTYEKAQKENKRFIIFSTYQSALRIKEAQEAGLNGIDLIICDEAHRTVGAMYSTNERDDKNAFTLCHSDENIKATKRLYMTATPKVYSESSKAKAKEKDNVIYSMDDAQTFGEEIYTLNFERAIALDLLTDYKVIILAVRSENLSGVTNSVNKKISQLEAKRH

SEQ ID NO: 7866 - protein, 451 aa, Helicobacter pylori
  misc_feature (B) LOCATION 1...451
  hypothetical: YES
KMQEISAYELIKEKLHAIPNQRHKGSLFEKISKQFLQEHDSANEYESIDLWYDWKLRGNERDKGIDIVITTSNKEYIAVQCKFHQNSISYNDISPFLTQLLSGVGGVKFKKGIIISTSNLTSEALKAIEQIRSTGMGIDIDEITEEDFIYSRIDWEKFDPTKTEDEIPLCDKKRPRPHQTEAIEKTKEYFSDPKNARGKLIMACGTGKTYTSLKIMESLDPKITLFLAPSIALLSQTFREYAQEKSEPFDASIVCSDDKTGQSKNEDNDDIKFFELPIKPSTRLEDILSTYEKAQKENKRFIIFSTYQSALRIKEAQEAGLNGIDLIICDEAHRTVGAMYSTNERDDKNVFTFCHSDENIKVTKRLYMTATLKVYSESSKAKAKEKDNVIYSMDDAQTFGEEIYTLNFERAIALDLLTDYKVIILAVRSENLSGVTNSVNKKISQLEAKRH

SEQ ID NO: 7867 - protein, 213 aa, Helicobacter pylori
  misc_feature (B) LOCATION 1...213
  hypothetical: YES
MFTLRELPFAKDSMGDFLSPVAFDFHHGKHHQTYVNNLNNLIKGTDFEKSSLFAILTKSSGGVFNNAAQIYNHDFYWDCLSPKATALSDELKEALEKDFGSLEKFKEDFIKSATTLFGSGWNWAAYNLDTQKIEIIQTSNAQTPVTDKKVPLLVVDVWEHAYYIDHKNARPVYLEKFYGHVNWHFVSQCYEWAKKEGLGSVDYYINELVHKKA

SEQ ID NO: 7868 - protein, 218 aa, Helicobacter pylori
  misc_feature (B) LOCATION 1...218
  hypothetical: YES
SQGENMFTLRELPFAKDSMGDFLSPVAFDFHHGKHHQTYVNNLNNLIKGTDFEKSSLFAILTKSSGGVFNNAAQIYNHDFYWDCLSPKATALSDELKEALEKDFGSLEKFKEDFIKSATTLFGSGWNWAAYNLDTQKIEIIQTSNAQTPVTDKKVPLLVVDVWEHAYYIDHKNARPVYLEKFYGHVNWHFVSQCYEWAKKEGLGSVDYYINELVHKKA

SEQ ID NO: 7869 - protein, 310 aa, Helicobacter pylori
  misc_feature (B) LOCATION 1...310
  hypothetical: YES
MRTLILSLLKHAILMGMLLKECQEKLKRSLNLSANHCVLSAGYGASSAIKKFQEILGVCIPSKTKKNLEPYLKDMALKRVIVGPYEHHSNEVSWREGLCEVVRIPLNEHGLLDLEILEQTLKKTPNSLVSVSAASNVTGILTPLKEVSSLCKEYRAILALDLANFSAHANPKDCEYQTGFYAPHKLLGGVGGCGLLGISKDLIDTQIPTSFSAGGVIKYANRTRHEFIDELPLREEFGTPGLLQFYRSALAYQLRDECGLDFIHKKENNLLRVLVYGLKDLPAINIYGNLTASRVGVVTFNIGGISPYDL

SEQ ID NO: 7870 - protein, 440 aa, Helicobacter pylori
  misc_feature (B) LOCATION 1...440
  hypothetical: YES
VRAFLNRSFAPLLNPNENLLDQVKSSIILKKGVSYFDWGASGLASALVEKRVKSLLPYYANAHSVASKHAILMGMLLKECQEKLKRSLNLSANHCVLSAGYGASSAIKKFQEILGVCIPSKTKKNLEPYLKDMALKRVIVGPYEHHSNEVSWREGLCEVVRIPLNEHGLLDLEILEQTLKKTPNSLVSVSAASNVTGILTPLKEVSSLCKEYRAILALDLANFSAHANPKDCEYQTGFYAPHKLLGGVGGCGLLGISKDLIDTQIPPSFSAGGVIKYANRTRHEFIDELPLREEFGTPGLLQFYRSALAYQLRDECGLDFIHKKENNLLRVLVYGLKDLPAINIYGNLTASRVGVVAFNIGGISPYDLARVLSYEYAIETRAGCSCAGPYGHDLLNLNAQKSSDFNAKPGWLRVSLHFTHSINDIDYLLDSLKKAVKKLR

SEQ ID NO: 7871 - protein, 446 aa, Helicobacter pylori
  misc_feature (B) LOCATION 1...446
  hypothetical: YES
KRWWYFVRAFLNRSFAPLLNPNENLLDQVKSSIILKKGVSYFDWGASGLASALVEKRVKSLLPYYANAHSVASKHAILMGMLLKECQEKLKRSLNLSANHCVLSAGYGASSAIKKFQEILGVCIPSKTKKNLEPYLKDMALKRVIVGPYEHHSNEVSWREGLCEVVRIPLNEHGLLDLEILEQTLKKTPNSLVSVSAASNVTGILTPLKEVSSLCKEYRAILALDLANFSAHANPKDCEYQTGFYAPHKLLGGVGGCGLLGISKDLIDTQIPPSFSAGGVIKYANRTRHEFIDELPLREEFGTPGLLQFYRSALAYQLRDECGLDFIHKKENNLLRVLVYGLKDLPAINIYGNLTASRVGVVAFNIGGISPYDLARVLSYEYAIETRAGCSCAGPYGHDLLNLNAQKSSDFNAKPGWLRVSLHFTHSINDIDYLLDSLKKAVKKLR

SEQ ID NO: 7872 - protein, 245 aa, Helicobacter pylori
  misc_feature (B) LOCATION 1...245
  hypothetical: YES
AMKKLMQKIEELLAIGGTQILFQGGVHPQLKIDYYENLVSHIAQKFPTITIHGFSAVEIDYISKISKLSLKEVLERLKNAGLSSIPGAGAEILSDRVRDVIAPKKLSSDRWIEVHRMAHLCGIKSTATMMFGSVDNEEDVIEHLQRVRDLQDETGGFRAFILWSFQPNNTPLKEEIPSIKKASSNRYLRYLACSRIFLDNIQNIQSSWVTQGSMIGQLALLSGANDLGSVMMEENVVKAAERVLA

SEQ ID NO: 7873 - protein, 244 aa, Helicobacter pylori
  misc_feature (B) LOCATION 1...244
  hypothetical: YES
MKKLMQKIEELLAIGGTQILFQGGVHPQLKIDYYENLVSHIAQKFPTITIHGFSAVEIDYISKISKLSLKEVLERLKNAGLSSIPGAGAEILSDRVRDVIAPKKLSSDRWIEVHRMAHLCGIKSTATMMFGSVDNEEDVIEHLQRVRDLQDETGGFRAFILWSFQPNNTPLKEEIPSIKKASSNRYLRYLACSRIFLDNIQNIQSSWVTQGSMIGQLALLSGANDLGSVMMEENVVKAAERVLA

SEQ ID NO: 7874 - protein, 318 aa, Helicobacter pylori
  misc_feature (B) LOCATION 1...318
  hypothetical: YES
MRINREESLDLMKNAPLKELGQRALRVKQRLHPENLTTFIVDRNINYTNICFVDCKFCAFKRTLKEKDAYVLSYEEIDQKIEELLAIGGTQILFQGGVHPQLKIDYYENLVSHIAQKFPTITIHGFSAVEIDYISKISKLSLKEVLERLKNAGLSSIPGAGAEILSDRVRDVIAPKKLSSDRWIEVHRMAHLCGIKSTATMMFGSVDNEEDVIEHLQRVRDLQDETGGFRAFILWSFQPNNTPLKEEIPSIKKASSNRYLRYLACSRIFLDNIQNIQSSWVTQGSMIGQLALLSGANDLGSVMMEENVVKAARHEFLA

SEQ ID NO: 7875 - protein, 363 aa, Helicobacter pylori
  misc_feature (B) LOCATION 1...363
  hypothetical: YES
LNFLWEQGFKMRINREEILDLMKNAPLKELGQRALRVKQRLHPENLTTFIVDRNINYTNICFVDCKFCAFKRTLKEKDAYVLSYEEIDQKIEELLAIGGTQILFQGGVHPQLKIDYYENLVSHIAQKFPTITIHGFSAVEIDYISKISKLSLKEVLERLKNAGLSSIPGAGAEILSDRVRDVIAPKKLSSDRWIEVHRMAHLCGIKSTATMMFGSVDNEEDVIEHLQRVRDLQDETGGFRAFILWSFQPNNTPLKEEIPSIKKASSNRYLRYLACSRIFLDNIQNIQSSWVTQGSMIGQLALLSGANDLGSVMMEENVVKAAGTSFCMIEAEMIELIEDIGSVAAKRNTAYEILKRYPAKAKV

SEQ ID NO: 7876 - protein, 57 aa, Helicobacter pylori
  misc_feature (B) LOCATION 1...57
  hypothetical: YES
QFIRKDLTMQKVTFKEETYQLEGKALKVGDKAPDVKLVNGDLQEVNFVGARRAFSGR

SEQ ID NO: 7877 - protein, 139 aa, Helicobacter pylori
  misc_feature (B) LOCATION 1...139
  hypothetical: YES
NWSMAICKKSTLLEQGVRFQVVSALPSLTGSVCLLQAKHFNEQAGKLPSVSFSVISMDLPFSQGQICGAEGIKDLRILSDFRYKAFGENYGVLLGKGSLQGLLARSVFVLDDKGVVIYKEIVQNILEEPNYEALLKVLK

SEQ ID NO: 7878 - protein, 166 aa, Helicobacter pylori
  misc_feature (B) LOCATION 1...166
  hypothetical: YES
MQKVTFKEETYQLEGKALKVGDKAPDVKLVNGDLQEVNLLKQGVRFQVVSALPSLTGSVCLLQAKHFNEQAGKLPSVSFSVISMDLPFSQGQICGAEGIKDLRILSDFRYKAFGENYGVLLGKGSLQGLLARSVFVLDDKGVVIYKEIVQNILEEPNYEALLKVLK

SEQ ID NO: 7879 - protein, 54 aa, Helicobacter pylori
  misc_feature (B) LOCATION 1...54
  hypothetical: YES
HHGSCDGEDGLNKLEMLFKKYGDDLRKHLKFVISDVEMPKMDGYHFLFKLQKDP

SEQ ID NO: 7880 - protein, 76 aa, Helicobacter pylori
  misc_feature (B) LOCATION 1...76
  hypothetical: YES
NSLFQMLKCLKWMAIISYSSSKKTLRFAYIPVIFNSSICDNYSAERAKEMGAVAYLVKFDAEKFTEEISKILDKNA

SEQ ID NO: 7881 - protein, 90 aa, Helicobacter pylori
  misc_feature (B) LOCATION 1...90
  hypothetical: YES
MLFKKYGDDLRKHLKFIISDVEMPKMDGYHFLFKLQKDPRFAYIPVIFNSSICDNYSAERAKEMGAVAYLVKFDAEKFTEEISKILDKNA

SEQ ID NO: 7882 - protein, 41 aa, Helicobacter pylori
  misc_feature (B) LOCATION 1...41
  hypothetical: YES
VLGVXNLRGNVFPLISLRLKFGLKAEKQNKDTRYLVVRHND

SEQ ID NO: 7883 - protein, 138 aa, Helicobacter pylori
  misc_feature (B) LOCATION 1...138
  hypothetical: YES
VSNQLKDLFERQKEANASSKQEDNEEILQFIGFIIGDEEYAIPILNILEIVKPIGYTRVPETPNYVLGVFNLRGNVFPLISLRLKFGLKAEKQNKDTRYLVVRHNDRSLGFSSLSGLMPSESASTIDPSQKLCAITII

SEQ ID NO: 7884 - protein, 144 aa, Helicobacter pylori
  misc_feature (B) LOCATION 1...144
  hypothetical: YES
IRRRPIVSNQLKDLFERQKEANASSKQEDNEEILQFIGFIIGDEEYAIPILNILEIVKPIGYTRVPETPNYVLGVFNLRGNVFPLISLRLKFGLKAEKQNKDTRYLVVRHNDRSLGFSSLSGLMPSESASTIDPSQKLCAITII

SEQ ID NO: 7885 - protein, 335 aa, Helicobacter pylori
  misc_feature (B) LOCATION 1...335
  hypothetical: YES
MRLGVNEAVELSLGELQNTPSISYFNSIVLSLNKVQKGSLFVAKDHALIPKALELGAYGILYTGEYPLSDRDVAWIKLKDIEHSLNHLFKFCLLNERVVGALLSPIELEIASKIIVSGFVWCLKESLEDLFIIEGCKIAFFDKLEWLHLFYKQERLKEDLKESRLIILNQSFFCSALVYEKQEYELKTPCIFLEPLKRVIQLCEKLQIEFDLSLLGKKEPALEHCKPFFVNKNLEIAPYGTTARVVVAEASKELFEMMLQKALETLSWGKIVVFCRKNSAAFFKKTNPYCYTTQNNLKEQLKNLAFNFAFIYGISSHHLESLLNPPFFKKTPTLW

SEQ ID NO: 7886 - protein, 335 aa, Helicobacter pylori; identical to SEQ ID NO: 7885
  misc_feature (B) LOCATION 1...335
  hypothetical: YES

SEQ ID NO: 7887 - protein, 67 aa, Helicobacter pylori
  misc_feature (B) LOCATION 1...67
  hypothetical: YES
YAYKVYGAIVSQNKDGVWVGDEAKTKARRKEILENRKVRSIPVKEWMEQERNAILEKEASKQVKYMY

SEQ ID NO: 7888 - protein, 72 aa, Helicobacter pylori
  misc_feature (B) LOCATION 1...72
  hypothetical: YES
GVISTQLIEVMKNNISHASQVKRDKQCITTENCFDNYDLYLNYIKGGPGFGDPIERDLNAILEDLNSKQLLP

SEQ ID NO: 7889 - protein, 134 aa, Helicobacter pylori
  misc_feature (B) LOCATION 1...134
  hypothetical: YES
EKEEKKTFCTDLLLRYGALHNPGMGLPLQHLSWNVKANTGGYGKYRGGNGFETLRMVWGAHDWTMFFMGNGYMNSDWGMMGGYPTASGYRFEAHNTNLENRIKNNASLPLGGDFNPTDRGYEKQHFSCVSSQKG

SEQ ID NO: 7890 - protein, 133 aa, Helicobacter pylori
  misc_feature (B) LOCATION 1...133
  hypothetical: YES
KEEKKTFCTDLLLRYGALHNPGMGLPLQHLSWNVKANTGGYGKYRGGNGFETLRMVWGAHDWTMFFMGNGYMNSDWGMMGGYPTASGYRFEAHNTNLENRIKNNASLPLGGDFNPTDRGYEKQHFSCVSSQKG

SEQ ID NO: 7891 - protein, 137 aa, Helicobacter pylori
  misc_feature (B) LOCATION 1...137
  hypothetical: YES
GWVGGVTHVIDTGSVTPGSMSTGQVQRFGDGYMITCRKTGANDESFKDWLHESQRSVRTPKYWILDERTRIAGCHMIRDLVMEVIKEDGIDSYMRFIDEVIEEGRRGLISRIKSMTIPGKYRKVAFVDVSYAHKDIG

SEQ ID NO: 7892 - protein, 603 aa, Helicobacter pylori
  misc_feature (B) LOCATION 1...603
  hypothetical: YES
VIDTGSVTPGSMSTGQVQRFGDGYMITCRKTGANDESFKDWLHESQRSVRTPKYWILDERTRIAGCHMIRDLVMEVIKEDGIDSYMRFIDEVIEEGRRGLISRIKSMTIPGKYKRVAFVDVPYAHKDIGVCSEFAKLDTIMHSPVEITINKDATWKLDFDGASRWGWHSFNCNQVSFTSGIWVMMTQTLIPTSRINDGAYFATQFRLKKGTWMNPDDRRTGHAYAWHFLVSGWSALWRGLSQAYYSRGYLEEVNSGNANTSNWLQGGGINQDGEIHAVNSFETSSCGTGACAIKDGLNHAAAIWNPEGDMGDIEIWEMAEPLLYLGRNVKANTGGYGKYRGGNGFETLRMVWGAHDWTMFFMGNGYMNSDWGMMGGYPAASGYRFEAHNTNLENRIKNNASLPLGGDFNPTDRGYEKHISHASQVKRDKQCITTENCFDNYDLYLNYIKGGPGFGDPIERDLNAILEDLNSKQLLPEYAYKVYGAIVSQNKDGVWVGDEAKTKARRKEILENRKARSIPVKEWMEQERNAILEKEASKQVKHMYATSFDLSPRFLNDFKTFWNLPKNWTVEEDELGVFTYGSKYRMDLSKLPDVRTVVLVDEK

SEQ ID NO: 7893 - protein, 159 aa, Helicobacter pylori
  misc_feature (B) LOCATION 1...159
  hypothetical: YES
ISKERLSDLEYRWAMALVYGGCISITTRIFYDINGSASDPLFDPKYSYYVWLVGLIAALLSNLLFNPKGRSVGYLMIETWQGFPKFFKAIFKARFFGAFYDAVLGARLRDFYVMLLTIPFIIAMHEISAYCGHPSNLLVEGLVILGFQGFLKLCAKWGW

SEQ ID NO: 7894 - protein, 168 aa, Helicobacter pylori
  misc_feature (B) LOCATION 1...168
  hypothetical: YES
MDTTKENLNGSKERLSDLEYRWAMALVYGGCISITTRIFYDINGSASDPLFDPKYSYYVWLVGLIAALLSNLLFNPKGRSVGYLMIETWQGFPKFFKAIFKARFFGAFYDAVLGARLRDFYVMLLTIPFIIAMHEISAYCGHPSNLLVEGLVILGFQGFLKLCAKWGW

SEQ ID NO: 7895 - protein, 222 aa, Helicobacter pylori
  misc_feature (B) LOCATION 1...222
  hypothetical: YES
MLDYRQRIDTLITKIEKARIAYSRHHIVKIVAVSKNASPEAIQHYYNCSQRAFGENKVQDLKIKMHSLEHLPLEWHMIGSLQENKINALLSLKPALLHSLDSLKLALKIEKRCEILGVNLNALLQVNSAYEESKSGVVPEEALETYSQISETCKRLKLKGLMCIGAHTDDETKIEKSFTTTKKLFDQIKNASVLSMGMSDDFELAIACGANLLRIGSFLFKE

SEQ ID NO: 7896 - protein, 225 aa, Helicobacter pylori
  misc_feature (B) LOCATION 1...225
  hypothetical: YES
RRIMLDYRQRIDTLITKIEKARIAYSRHHIVKIVAVSKNASPEAIQHYYNCSQRAFGENKVQDLKFKMHSLEHLPLEWHMIGSLQENKINALLSLKPALLHSLDSLKLALKIEKRCEILGVNLNALLQVNSAYEESKSGVVPEEALETYSQISETCKRLKLKGLMCIGAHTDDETKIEKSFTTTKKLFDQIKNASVLSMGMSDDFELAIACGANLLKNGSFWFKE

SEQ ID NO: 7897 - protein, 110 aa, Helicobacter pylori
  misc_feature (B) LOCATION 1...110
  hypothetical: YES
KAFLDLKMLQCLSLKRKGNLTMDFLEKVLDNQVTESKELVRLYDYDLYTLGEAADRMRQNMHQKIVYFNVNRHLNPSNICADACKFCAFSADRKNPNPYEMSLVDIGKTP

SEQ ID NO: 7898 - protein, 283 aa, Helicobacter pylori
  misc_feature (B) LOCATION 1...283
  hypothetical: YES
YEMSLEEILEKVKNSYNKGIKEVHIVSAHNPNYSYEWYLKVFETIKQEMPNLHLKAMTAAEVHFLSAKFNKPFELVLEDMLKAGVDSMPGGGAEIFDEEIRRKICNGKVGSSRWLEIHAYWHKLGKMSNATMLFGHIENKIHRIDHMLRIKKIQSPKNKVENKEGGFNAFIPLLYQKENNYLKVGKSPSAIEILKTIAISRILLNNIPHIKAYWATLGLNLALVAQEFGANDLDGTIEIESIQSAAGAKSRHGLEKEDLIFKIKDSGFVAVERDSLYNFIQKF

SEQ ID NO: 7899 - protein, 282 aa, Helicobacter pylori
  misc_feature (B) LOCATION 1...282
  hypothetical: YES
EMSLEEILEKVKNSYNKGIKEVHIVSAHNPNYSYEWYLKVFETIKQEMPNLHLKAMTAAEVHFLSAKFNKPFELVLEDMLKAGVDSMPGGGAEIFDEEIRRKICNGKVGSSRWLEIHAYWHKLGKMSNATMLFGHIENKIHRIDHMLRIKKIQSPKNKVENKEGGFNAFIPLLYQKENNYLKVGKSPSAIEILKTIAISRILLNNIPHIKAYWATLGLNLALVAQEFGANDLDGTIEIESIQSAAGAKSRHGLEKEDLIFKIKDSGFVAVERDSLYNFIQKF

SEQ ID NO: 7900 - protein, 360 aa, Helicobacter pylori
  misc_feature (B) LOCATION 1...360
  hypothetical: YES
MDFLEKVLDNQVTESKELVRLYDYDLYTLGEAADRMRQNMHQKIVYFNVNRHLNPSNICADACKFCAFSAHRKNPNPYEMSLEEILEKVKNSYNKGIKEVHIVSAHNPNYSYEWYLKVFETIKQEMPNLHLKAMTAAEVHFLSAKFNKPFELVLEDMLKAGVDSMPGGGAEIFDEEIRRKICNGKVGSSRWLEIHAYWHKLGKMSNATMLFGHIENKIHRIDHMLRIKKIQSPKNKVENKEGGFNAFIPLLYQKENNYLKVGKSPSAIEILKTIAISRILLNNIPHIKAYWATLGLNLALVAQEFGANDLDGTIEIESIQSAAGAKSRHGLEKEDLIFKIKDSGFVAVERDSLYNFIQKF

SEQ ID NO: 7901 - protein, 217 aa, Helicobacter pylori
  misc_feature (B) LOCATION 1...217
  hypothetical: YES
MELLTLDGVVEKGVFEIPSYQRGYAWQVRQWKDFWNDLEHVSKLGNKFHYMHSLTLRGLENELEDSAFEIIDGQQRLATSLILLGLLAKTTKHKDPKYNSMNLEPVLSYKYYGLNEAFGAIMGEEKDLERFQTSFYAKNLIDAYAFFKEKISDTPMETLEKMFDVLTKKMLFSVAELNDNRIDPFSSFETINNRGKDLSTLELFKNRLHFVAHKICN

SEQ ID NO: 7902 - protein, 217 aa, Helicobacter pylori; identical to SEQ ID NO: 7901
  misc_feature (B) LOCATION 1...217
  hypothetical: YES

SEQ ID NO: 7903 - protein, 221 aa, Helicobacter pylori
  misc_feature (B) LOCATION 1...221
  hypothetical: YES
ERILMELLTLDGVVEKGVFEIPSYQRGYAWQVRQWKDFWNDLEHVSKLGNKFHYMHSLTLRGLENELEDSAFEIIDGQQRLATSLILLGLLAKTTKHKDPKYNSMNLEPVLSYKYYGLNEAFGAIMGEEKDLERFQTSFYAKNLIDAYAFFKEKISDTPMETLEKMFDVLTKKMLFSVAELNDNRIDPFSSFETINNRGKDLSTLELFKNRLHFVAHKICN

SEQ ID NO: 7904 - protein, 244 aa, Helicobacter pylori
  misc_feature (B) LOCATION 1...244
  hypothetical: YES
MALRPWRKGPFEISQIKIDSEWDSSIKWDLVKNATPLKDKVVADVGCNNGYYLFKMLEHKPKSLVGFDPGVLVKKQFEFLAPFFDKEKKIIYESLGVEDFHEKYPNAFDVIFCLGVLYHRKSPLEALKALYHALKIKGELVLDTLIIDSPLDIALCPKKTYAKMKNVYFIPSVSALKGWCERVGFENFEILSVLKTTPKEQRKTDFILGQSLEDFLDKTDHSKTLEGYDAPLRGYFKMLKPSKR

SEQ ID NO: 7905 - protein, 261 aa, Helicobacter pylori
  misc_feature (B) LOCATION 1...261
  hypothetical: YES
MLICNDKFNPKTLLEEIMALRPWRKGPFEISQIKIDSEWDSSIKWDLVKNATPLKDKVVADVGCNNGYYLFKMLEHKPKSLVGFDPGVLVKKQFEFLAPFFDKEKKIIYESLGVEDFHEKYPNAFDVIFCLGVLYHRKSPLEALKALYHALKIKGELVLDTLIIDSPLDIALCPKKTYAKMKNVYFIPSVSALKGWCERVGFENFEILSVLKTTPKEQRKTDFILGQSLEDFLDKTDHSKTLEGYDAPLRGYFKMLKPSKR

SEQ ID NO: 7906 - protein, 262 aa, Helicobacter pylori
  misc_feature (B) LOCATION 1...262
  hypothetical: YES
VMLICNDKFNPKTLLEEIMALRPWRKGPFEISQIKIDSEWDSSIKWDLVKNATPLKDKVVADVGCNNGYYLFKMLEHKPKSLVGFDPGVLVKKQFEFLAPFFDKEKKIIYESLGVEDFHEKYPNAFDVIFCLGVLYHRKSPLEALKALYHALKIKGELVLDTLIIDSPLDIALCPKKTYAKMKNVYFIPSVSALKGWCERVGFENFEILSVLKTTPKEQRKTDFILGQSLEDFLDKTDHSKTLEGYDAPLRGYFKMLKPSKR

SEQ ID NO: 7907 - protein, 263 aa, Helicobacter pylori
  misc_feature (B) LOCATION 1...263
  hypothetical: YES
MAIRFDHNNNSEEWQMLFNKINNGSPFRVITFIGPILSHFKNVMRSGYLSSEPTKQDRIKSFLINKREFIGFVEIVIGPSESLFFVYENEPSATFNLKSYLLVLAKMHCNPTAICYCGNKQDAQNTNTKEIKFLSAKSHDFGKEMDSKSVELSNSNTFIQSLLKLGSFLHGKTIESLNNPTNYPPINLVVTPALAPWKTTVEIEEHRKNITFDHYRQSSAQNIKINEIANDLKQGEVVSNKLIANTLITQKAPSDTSHDDDLD

SEQ ID NO: 7908 - protein, 274 aa, Helicobacter pylori
  misc_feature (B) LOCATION 1...274
  hypothetical: YES
LKEIFEKGINNMAIRFDHNNNSEEWQMLFNKINNGSPFRVITFIGPILSHFKNVMRSGYLSSEPTKQDRIKSFLINKREFIGFVEIVIGPSESLFFVYENEPSATFNLKSYLLVLAKMHCNPTAICYCGNKQDAQNTNTKEIKFLSAKSHDFGKEMDSKSVELSNSNTFIQSLLKLGSFLHGKTIESLNNPTNYPPINLVVTPALAPWKTTVEIEEHRKNITFDHYRQSSAQNIKINEIANDLKQGEVVSNKLIANTLITQKAPSDTSHDDDLD

SEQ ID NO: 7909 - protein, 100 aa, Helicobacter pylori
  misc_feature (B) LOCATION 1...100
  hypothetical: YES
RIVIFVEHASNDLNNPYMLLWRIVNNIDAKRDILTSKHCFFIDATNKGVMDKHFREWPTETNCSMEVIENLKKKGLLKDFETLNQKFHLTHSFSTHKEDL

SEQ ID NO: 7910 - protein, 465 aa, Helicobacter pylori
  misc_feature (B) LOCATION 1...465
  hypothetical: YES
IFILGNPPMRYNNACKPSCTLTPLENFTESLKILKDLWDLIYVFPKKIARPKDFITKQDKEVNLWDLPVLKTWEKDGGAFITMGQVYTQSLDHKKKNLGMYRLQVYDKNHLGLHWQIHKDSQLFFHEYAKAKVKMPISIAIGGDLLYTWCATAPLPYGIYELMLYGFIREKKARVMPCLSNPLSVPSDCDIVIEGFVDCEKLELEGPFGDHTGYYTPIEPYPVLEVKTISYKKDSIYLATVVGKPPLEDKYMGYLTERLFLPLLQTHAPNLIDYYMPENGVFHNLILAKIHTRYNAHAKQVMHAFWGVGQMSFVKHAIFVNEDAPNLRDTNAIIEYILENFSKENALISQGVCDALDHASPEYAMGGKLGIDATSKSNTPYPTLLNDNALLALLQDKMQNIVLLKQYYPHTRNPICVISVEKKDKSVIELAKNLLGFEKHLTHCHLCRACQQRFKQPLHAVMAHR

SEQ ID NO: 7911 - protein, 578 aa, Helicobacter pylori
  misc_feature (B) LOCATION 1...578
  hypothetical: YES
MEAKPFLFTQPIRKEHNQIKTFGMPVLMNAFGSFKRLDLLLKTPIEDLQQRMQAFLHFDAPKNFTESLKILKDLWDLRHVFPKKTARPKDLITKQDKEVNLWDLPVLKTWEKDGGAFITMGQVYTQSLDHKKKNLGMYRLQVYDKNHLGLHWQIHKDSQLFFHEYAKAKVKMPISIAIGGDLLYTWCATAPLPYGIYELMLYGFIREKKARVMPCLSNPLSVPSDCDIVIEGFVDCEKLELEGPFGDHTGYYTPIEPYPVLEVKTISYKKDSIYLATVVGKPPLEDKYMGYLTERLFLPLLQTHAPNLIDYYMPENGVFHNLILAKIHTRYNAHAKQVMHAFWGVGQMSFVKHAIFVNEDAPNLRDTNAIIEYILENFSKENALISQGVCDALDHASPEYAMGGKLGIDATSKSNTPYPTLLNDNALLALLQDKMQNIVLLKQYYPHTRNPICVISVEKKDKSVIELAKNLLGFEEHLRIVIFVEHASNDLNNPYMLLWRIVNNIDAKRDILTSKHCFFIDATNKGVMDKHFREWPTETNCSMEVIENLKKKGLLKDFETLNQKFHLTHSFSTHKEDL

SEQ ID NO: 7912 - protein, 616 aa, Helicobacter pylori
  misc_feature (B) LOCATION 1...616
  hypothetical: YES
MRDFLKLLKKHDELKIIDTPLEVDLEIAHLAYIEAKKPNGGKALLFTQPIRKEHNQIKTFGMPVLMNAFGSFKRLDLLLKTPIEDLQQRMQAFLHFDAPKNFTESLKILKDLWDLRHVFPKKTARPKDLITKQDKEVNLWDLPVLKTWEKDGGAFITMGQVYTQSLDHKKKNLGMYRLQVYDKNHLGLHWQIHKDSQLFFHEYAKAKVKMPISIAIGGDLLYTWCATAPLPYGIYELMLYGFIREKKARVMPCLSNPLSVPSDCDIVIEGFVDCEKLELEGPFGDHTGYYTPIEPYPVLEVKTISYKKDSIYLATVVGKPPLEDKYMGYLTERLFLPLLQTHAPNLIDYYMPENGVFHNLILAKIHTRYNAHAKQVMHAFWGVGQMSFVKHAIFVNEDAPNLRDTNAIIEYILENFSKENALISQGVCDALDHASPEYAMGGKLGIDATSKSNTPYPTLLNDNALLALLQDKMQNIVLLKQYYPHTRNPICVISVEKKDKSVIELAKNLLGFEEHLRIVIFVEHASNDLNNPYMLLWRIVNNIDAKRDILTSKHCFFIDATNKGVMDKHFREWPTETNCSMEVIENLKKKGLLKDFETLNQKFHLTHSFSTHKEDL

SEQ ID NO: 7913 - protein, 205 aa, Helicobacter pylori
  misc_feature (B) LOCATION 1...205
  hypothetical: YES
MDWIGLAFIAFRAYRYGEENITIENLPTLEKNFFNKHNNSALEFLKESIHSKKNTEKWYKWGKTLNYLLYEYELYHNPETTLNFDGSIESIEHILPQKPDQGYSAKEKNWAKNPHVVHALGNLLLIPKNANSSLSNKPFDEKRKEYLKGSYSEKEVAKNASFGITEIQKRSEKLLDFLIARYRIVELVGENAIKAFKNALLKEIK

SEQ ID NO: 7914 - protein, 205 aa, Helicobacter pylori; identical to SEQ ID NO: 7913
  misc_feature (B) LOCATION 1...205
  hypothetical: YES

SEQ ID NO: 7915 - protein, 134 aa, Helicobacter pylori
  misc_feature (B) LOCATION 1...134
  hypothetical: YES
VDKGLTPPFLNVLSLAFKQDMKTDLIFVVTKSNKLSKKVLCDFDAFLLSEAVMSDMPAKALFHKEFLFQSKENKTLYVFSLINSQYCSKGGNYRHKLERLERWFVQKAPELAESHRVDYKSQYDKTQTKIKNER

SEQ ID NO: 7916 - protein, 136 aa, Helicobacter pylori
  misc_feature (B) LOCATION 1...136
  hypothetical: YES
VRVDKGLTPPFLNVLSLAFKQDMKTDLIFVVTKSNKLSKKVLCDFDAFLLSEAVMSDMPAKALFHKEFLFQSKENKTLYVFSLINSQYCSKGGNYRHKLERLERWFVQKAPELAESHRVDYKSQYDKTQTKIKNER

SEQ ID NO: 7917 - protein, 135 aa, Helicobacter pylori
  misc_feature (B) LOCATION 1...135
  hypothetical: YES
RVDKGLTPPFLNVLSLAFKQDMKTDLIFVVTKSNKLSKKVLCDFDAFLLSEAVMSDMPAKALFHKEFLFQSKENKTLYVFSLINSQYCSKGGNYRHKLERLERWFVQKAPELAESHRVDYKSQYDKTQTKIKNER

SEQ ID NO: 7918 - protein, 164 aa, Helicobacter pylori
  misc_feature (B) LOCATION 1...164
  hypothetical: YES
MSVFQTSLCVGLLFFGGVLLGDSSKALKVRVDKGLTPPFLNVLSLAFKQDMKTDLIFVVTKSNKLSKKVLCDFDAFLLSEAVMSDMPAKALFHKEFLFQSKENKTLYVFSLINSQYCSKGGNYRHKLERLERWFVQKAPELAESHRVDYKSQYDKTQTKIKNER

SEQ ID NO: 7919 - protein, 106 aa, Helicobacter pylori
  misc_feature (B) LOCATION 1...106
  hypothetical: YES
RRMVMSKYTQEQIKNLVEGNLDWNTVLKVLSMPKDHERYQMYLKVLQDKVDFDEQIVLPLGPHLFVVQDPQNKWVINCSCGHAFCAPKEKLELHADIYVPRYRRPN

SEQ ID NO: 7920 - protein, 109 aa, Helicobacter pylori
  misc_feature (B) LOCATION 1...109
  hypothetical: YES
MSKYTQEQIKNLVEGNLDWNTVLKMLSMPKDHERFQMYLKVLQDKVDFDDKIVLPLGPHLFVVQDLKRSGSLSVHAVMRSALQRRIGNCMQTSMCAIQQKKWKRCILNS

SEQ ID NO: 7921 - protein, 120 aa, Helicobacter pylori
  misc_feature (B) LOCATION 1...120
  hypothetical: YES
DQINRFSEKERHQLFLEPQTIHKSEYYINGLSTSLPLDVQEKVIHSIKGLENALITRYGYAIEYDFIQPTELTHALETKKIKGLYLAGQINGTTGYEEAAAQGLMAGINAVLALKNQAPF

SEQ ID NO: 7922 - protein, 118 aa, Helicobacter pylori
  misc_feature (B) LOCATION 1...118
  hypothetical: YES
QINRFSEKERHQLFLEPQTIHKSEYYINGLSTSLPLDVQEKVIHSIKGLENALITRYGYAIEYDFIQPTELTHALETKKIKGLYLAGQINGTTGYEEAAAQGLMAGINAVLALKNQAP

SEQ ID NO: 7923 - protein, 473 aa, Helicobacter pylori
  misc_feature (B) LOCATION 1...473
  hypothetical: YES
VIITTGTFLKGVVHIGEHQNQNGRFGENASNSLALNLRELGFKVERLKTGTCPRVAGNSIDFEGLEEHFGDANPPYFSYKTKDFNPTQLSCFITYTNPITHQIIRDNFHRAPLFSGQIEGIGPRYCPSIEDKINRFSEKERHQLFLEPQTIHKSEYYINGLSTSLPLDVQEKVIHSIKGLENALITRYGYAIEYDFIQPTELTHALETKKIKGLYLAGQINGTTGYEEAAAQGLMAGINAVLALKNQAPFILKRNEAYIGVLIDDLVTKGTNEPYRMFTSRAEYRLLLREDNTLFRLGEHAYRLGLMEQDFYKELEKDKQAIQENLKRLKECVLTPSKEVLKRLNELGENPINDKMDGVSLLARDSFNLEKMRSFFSFLVPLNERVLEQIKIECKYNIYIEKQHENIAKMDSMLKVSIPKHFVFKGIPGLSLEAVEKLEKFRPKSLFEASEISGITPANLDVLHLYIHLRKNS

SEQ ID NO: 7924 - protein, 473 aa, Helicobacter pylori; identical to SEQ ID NO: 7923
  misc_feature (B) LOCATION 1...473
  hypothetical: YES

SEQ ID NO: 7925 - protein, 368 aa, Helicobacter pylori
  misc_feature (B) LOCATION 1...368
  hypothetical: YES
MLTQEDVLNALKTIIYPNFEKDIVSFGFVKNITLHDNQLGLLIEIPSSSEETSAILRENISKAMQEKGVKALNLDIKTPPKPQAPKPTTKNLAKNIKHVVMISSGKGGVGKSTTSVNLSIALANLNQKVGLLDADVYGPNIPRMMGLQNADVIMDPSGKKLIPLKAFGVSVMSMGLLYDEGQSLIWRGPMLMRAIEQMLSDIIWGDLDVLVVDMPPGTGDAQLTLAQAVPLSAGITVTTPQIVSLDDAKRSLDMFKKLHIPIAGIVENMGSFVCEHCKKESEIFGSNSMSGLLEAYNTQILAKLPLEPKVRLGGDKGEPIVISHPTSVSAKIFEKMAKDLSAFLDKVEREKLADNKDIQPTQTHAYSH

SEQ ID NO: 7926 - protein, 412 aa, Helicobacter pylori
  misc_feature (B) LOCATION 1...412
  hypothetical: YES
MVQFQNTLIKFHALSFKNANLIYNAKLNKTCYKENSNTIILRIKMLTQEDVLNALKTIIYPNFEKDIVSFGFVKNITLHDNQLGLLIEIPSSSEETSAILRENISKAMQEKGVKALNLDIKTPPKPQAPKPTTKNLAKNIKHVVMISSGKGGVGKSTTSVNLSIALANLNQKVGLLDADVYGPNIPRMMGLQNADVIMDPSGKKLIPLKAFGVSVMSMGLLYDEGQSLIWRGPMLMRAIEQMLSDIIWGDLDVLVVDMPPRNRRCAAHAAQAVPLSAGITVTTPQIVSLDDAKRSLDMFKKLHIPIAGIVENMGSFVCEHCKKESEIFGSNSMSGLLEAYNTQILAKLPLEPKVRLGGDKGEPIVISHPTSVSAKIFEKMAKDLSAFLDKVEREKLADNKDIQPTQTHAYSH

SEQ ID NO: 7927 - protein, 412 aa, Helicobacter pylori
  misc_feature (B) LOCATION 1...412
  hypothetical: YES
MVQFQNTLIKFHALSFKNANLIYNAKLNKTCYKENSNTIILRIKMLTQEDVLNALKTIIYPNFEKDIVSFGFVKNITLHDNQLGLLIEIPSSSEETSAILRENISKAMQEKGVKALNLDIKTPPKPQAPKPTTKNLAKNIKHVVMISSGKGGVGKSTTSVNLSIALANLNQKVGLLDADVYGPNIPRMMGLQNADVIMDPSGKKLIPLKAFGVSVMSMGLLYDEGQSLIWRGPMLMRAIEQMLSDIIWGDLDVLVVDMPPGTGDAQLTLAQAVPLSAGITVTTPQIVSLDDAKRSLDMFKKLHIPIAGIVENMGSFVCEHCKKESEIFGSNSMSGLLEAYNTQILAKLPLEPKVRLGGDKGEPIVISHPTSVSAKIFEKMAKDLSAFLDKVEREKLADNKDIQPTQTHAYSH

SEQ ID NO: 7928 - protein, 425 aa, Helicobacter pylori
  misc_feature (B) LOCATION 1...425
  hypothetical: YES
KQFGRRVFTQIPKMVQFQNTLIKFHALSFKNANLIYNAKLNKTCYKENSNTIILRIKMLTQEDVLNALKTIIYPNFEKDIVSFGFVKNITLHDNQLGLLIEIPSSSEETSAILRENISKAMQEKGVKALNLDIKTPPKPQAPKPTTKNLAKNIKHVVMISSGKGGVGKSTTSVNLSIALANLNQKVGLLDADVYGPNIPRMMGLQNADVIMDPSGKKLIPLKAFGVSVMSMGLLYDEGQSLIWRGPMLMRAIEQMLSDIIWGDLDVLVVDMPPGTGDAQLTLAQAVPLSAGITVTTPQIVSLDDAKRSLDMFKKLHIPIAGIVENMGSFVCEHCKKESEIFGSNSMSGLLEAYNTQILAKLPLEPKVRLGGDKGEPIVISHPTSVSAKIFEKMAKDLSAFLDKVEREKLADNKDIQPTQTHAYSH

SEQ ID NO: 7929 - protein, 85 aa, Helicobacter pylori
  misc_feature (B) LOCATION 1...85
  hypothetical: YES
MEFYKRVLKLHHFRNLGKNSPTKLLLNSSFDEKHGGLVVLVGENNVGKSNVLEALKIFNDADIKLCSEEDYFKDHEKDTLLSLEE

SEQ ID NO: 7930 - protein, 86 aa, Helicobacter pylori
  misc_feature (B) LOCATION 1...86
  hypothetical: YES
GMEFYKRVLKLHHFRNLGKNSPTKLLLNSSFDEKHGGLVVLVGENNVGKSNVLEALKIFNDADIKLCSEEDYFKDHEKDTLLSLEE

SEQ ID NO: 7931 - protein, 406 aa, Helicobacter pylori
  misc_feature (B) LOCATION 1...406
  hypothetical: YES
LDNESATLLESLQVIRDETNEVITFLNPNELELLRPTGENTTSKIASIALEESNKLNEKETNTQEQAKHTEKEQEKPKIAPNNDIDLKDKYANLHSFFKQTELDIKQKRIKTKLDFKESFLNYAKNHMNEDELKVLLVVSQKEPTKLTKEHINLIKDCLEQAHGNKHMQDKGLQLSVKSILGHQLEKEHHEVLKDYLAKSKDSLEPMDNRVYEVMRKHLDKQQAKTLKNLDSATQSVGVNAIKEQNKANKNSEQPKNSQNEPRQETTNAQTNSTATQQENTKQNQAIEQNGTTQAKEPQSKQEPKKTLHPDEPWLNHDPKAHKCLQERQKEEIQEKAQSNNSDEPWIEHGKRMQEKAKAHYQACLEREKAKELAKEQNNAQKEVKKEMPTIDYGYTQNTLSKSRRR

SEQ ID NO: 7932 - protein, 466 aa, Helicobacter pylori
  misc_feature (B) LOCATION 1...466
  hypothetical: YES
KRRARKIRPRGQNKALEQYYESQNPDTLYEQQVFQEQEKELLNQQDLELETLRDNNTKQGLDNESATLLESLQVIRDETNEVITFLNPNELELLRPTGENTTSKIASIALEESNKLNEKETNTQEQAKHTEKEQEKPKIAPNNDIDLKDKYANLHSFFKQTELDIKQKRIKTKLDFKESFLNYAKNHMNEDELKVLLVVSQKEPTKLTKEHINLIKDCLEQAHGNKHMQDKGLQLSVKSILGHQLEKEHHEVLKDYLAKSKDSLEPMDNRVYEVMRKHLDKQQAKTLKNLDSATQSVGVNAIKEQNKANKNSEQPKNSQNEPRQETTNAQTNSTATQQENTKQNQAIEQNGTTQAKEPQSKQEPKKTLHPDEPWLNHDPKAHKCLQERQKEEIQEKAQSNNSDEPWIEHGKRMQEKAKAHYQACLEREKAKELAKEQNNAQKEVKKEMPTIDYGYTQNTLSKSRRR

SEQ ID NO: 7933 - protein, 232 aa, Helicobacter pylori
  misc_feature (B) LOCATION 1...232
  hypothetical: YES
MQDFINGFLKAWKAWSDDGKDAFLESFLDEVKNSKNDPTNFLGILEQEIKSLSQEGLQDDMSSMLEVIESMKNEISNLKDNDNVSDFFNAFQQEINEEQSISNDNPSEFVESLEKVIVETQNANKHEIQNSSKNEVELTEEKSFLEMSEDEYYEYQQEQYIQMNEDDGIARVSAKLEQQELEREEAELESKALQDYEKNQIQRAGEISIAEHENKLEKEELERYALEGKIKP

SEQ ID NO: 7934 - protein, 237 aa, Helicobacter pylori
  misc_feature (B) LOCATION 1...237
  hypothetical: YES
RQGQIMQDFINGFLKAWKAWSDDGKDAFLESFLDEVKNSKNDPTNFLGILEQEIKSLSQEGLQDDMSSMLEVIESMKNEISNLKDNDNVSDFFNAFQQEINEEQSISNDNPSEFVESLEKVIVETQNANKHEIQNSSKNEVELTEEKSFLEMSEDEYYEYQQEQYIQMNEDDGIARVSAKLEQQELEREEAELESKALQDYEKNQIQRAGEISIAEHENKLEKEELERYALEGKIKP

SEQ ID NO: 7935 - protein, 350 aa, Helicobacter pylori
  misc_feature (B) LOCATION 1...350
  hypothetical: YES
MKAWNEMDIKEQKEVFARFLASEIAKSLESGLEFKPNNRAYNGNAGNAYNGLNSLILDAKQHENGYESNVWVGLDDALKLGANPKEVEHIKNNTKSKNNPNGFYDKASIAYIRDYEMRYIKARDKEGNLIPLKDKEGNLKHYSNGEVIYENEKVPQRDKEGNIKYMQDGVTPFYEFKKEKIDIEPTLEIKNLYNVNVFQTLDKTKLKELDPKTLRTQYISNTFSMNNQNLVIYDLSKHLNEKQYNKVLDYVNQYGATHHEKRKQHKIYQEPQQQIAPNTDNNAKENNTKEPNNNEMNMAEFSKMLEMAQNNPQMLAMLQQTLNKGAEQQKYDHYFANDEVVLTQSKGRGR

SEQ ID NO: 7936 - protein, 350 aa, Helicobacter pylori; identical to SEQ ID NO: 7935
  misc_feature (B) LOCATION 1...350
  hypothetical: YES

SEQ ID NO: 7937 - protein, 39 aa, Helicobacter pylori
  misc_feature (B) LOCATION 1...39
  hypothetical: YES
MDKLEQIDSIKPFNERLKGILENAKENLQAQSCVKGRGR

SEQ ID NO: 7938 - protein, 169 aa, Helicobacter pylori
  misc_feature (B) LOCATION 1...169
  hypothetical: YES
VVVETYTDIIKNYQREKNALIYNKQVERTREYRKPKPVNKPQDSFNVILAFDNDINGKGYKEKCEGILYALTQQFPTIYTPFSKDCNDDLKLAHIIENKAINIDTMAEFLESSLEKLKDNYTSTQEKENIMDKLEQIDSIKPFNERLKGILENAKENLQAQSCVKGRGR

SEQ ID NO: 7939 - protein, 182 aa, Helicobacter pylori
  misc_feature (B) LOCATION 1...182
  hypothetical: YES
INFKQMASDDFNSVVVETYTDIIKNYQREKNALIYNKQVERTREYRKPKPVNKPQDSFNVILAFDNDINGKGYKEKCEGILYALTQQFPTIYTPFSKDCNDDLKLAHIIENKVINIDTMAEFLESSLEKLKDNYTSTQEKENIMDKLEQIDSIKPFNERLKGILENAKENLQAQSCVKGRGR

SEQ ID NO: 7940 - protein, 400 aa, Helicobacter pylori
  misc_feature (B) LOCATION 1...400
  hypothetical: YES
ENPMSYIPNLTALPLHEILLDNGYVINKNKHSKNNPCLKHENEEGSLVIFKNQNKDGSISYTYKETHTDKVGNIITFCKDRNISVEDLLAGKLEGYRNKKDTLQARDNSSENNEEIQKIINEFKNLKPYDLQNATLIKKRGIDTKLLEPYKEHLKTDNFNNLILATYLAFENKNLNVIPIHQCGINKRLNTPLSTDKEGNIRDKPLKSIAQGSKGIEVLFPNNLSLVKNVIVTENIFDSLAYLELQGLEPKESVLISTAGQFNAQKLELFLKSFFKQLKGRQQRAYNHYLKQEEQWQELVRQGMASDDFNSVVVETYTDIIKNYQREKNALIYNKQVERTREYRKPKPVNKPQDSFNVILAFDNDINGKGTKPNARVFYMFLHSNSPLFIRLFQKIVMMI

SEQ ID NO: 7941 - protein, 477 aa, Helicobacter pylori
  misc_feature (B) LOCATION 1...477
  hypothetical: YES
MSYIPNLTALPLHEILLDNGYVINKNKHSKNNPCLKHENEEGSLVIFKNQNKDGSISYTYKETHTDKVGNIITFCKDRNISVEDLLAGKLEGYRNKKDTLQARDNSSENNEEIQKIINEFKNLKPYDLQNATLIKKRGIDTKLLEPYKEHLKTDNFNNLILATYLAFENKNLNVIPIHQCGINKRLNTPLSTDKEGNIRDKPLKSIAQGSKGIEVLFPNNLSLVKNVIVTENIFDSLAYLELQGLEPKESVLISTAGQFNAQKLELFLKSFFKQLKGRQQRAYNHYLKQEEQWQELVRQGMASDDFNSVVVETYTDIIKNYQREKNALIYNKQVERTREYRKPKPVNKPQDSFNVILAFDNDINGKGYKEKCEGILYALTQQFPTIYTPFSKDCNDDLKLAHIIENKAINIDTMAEFLESSLEKLKDNYTSTQEKENIMDKLEQIDSIKPFNERLKGILENAKENLQAQSCVKGRGR

SEQ ID NO: 7942 - protein, 73 aa, Helicobacter pylori
  misc_feature (B) LOCATION 1...73
  hypothetical: YES
LKTLFFKKGGINSNKKPLKLKIFNKTTALHPKKEILRYNTFAFAIFSFHGKLLFEDYPHKSNLWGSLFYNNLS

SEQ ID NO: 7943 - protein, 82 aa, Helicobacter pylori
  misc_feature (B) LOCATION 1...82
  hypothetical: YES
RVSQLCVCVLKTLFFKKGGINSNKKPLKLKIFNKTTALHPKKEILRYNTFAFAIFSFHGKLLFEDYPHKSNLWGSLFYNNLS

SEQ ID NO: 7944 - protein, 68 aa, Helicobacter pylori
  misc_feature (B) LOCATION 1...68
  hypothetical: YES
KDCLMNHFYKRCLRFSLVGLLGVGFLSVQLTLGSFIDGDLDIPKFSYEDSLLKKGDPNGVHKVSGARL

SEQ ID NO: 7945 - protein, 149 aa, Helicobacter pylori
  misc_feature (B) LOCATION 1...149
  hypothetical: YES
TFQNSAMKILCLKREILMACIRCQVRDYKGKMQEAEIHSEIRIALKPGVKKEVKKGKIYSAQINDGMCYAFRMLQTGNNTTSLDSKEFPKQSREKKGQVITLIGQNEVPYLILETDCQVGDIAKISLVGNFDGTGFLTEYKFKGAKPIY

SEQ ID NO: 7946 - protein, 186 aa, Helicobacter pylori
  misc_feature (B) LOCATION 1...186
  hypothetical: YES
LMNHFYKRCLRFSLVGLLGVGFLSVQLDARSFIDGDLDIQKFSYEDSLLKKGDPNGVHKVQVRDYKGKMQEAEIHSEIRIALKPGVKKEVKKGKIYSAQINDGMCYAFRMLQTGNNTTSLDSKEFPKQSREKKGQVITLIGQNEVPYLILETDCQVGDIAKISLVGNFDGTGFLTEYKFKGAKPIY

SEQ ID NO: 7947 - protein, 54 aa, Helicobacter pylori
  misc_feature (B) LOCATION 1...54
  hypothetical: YES
MGFFKLKEHNTNIATEFRAGLTTFITMIYIVPLNALILSQANMPYEALLSATAI

SEQ ID NO: 7948 - protein, 57 aa, Helicobacter pylori
  misc_feature (B) LOCATION 1...57
  hypothetical: YES
SIPNSKELSNMGFFKLKEHNTNIATEFRAGLTTFITMIYIVPLNALILSQANMPYEA

SEQ ID NO: 7949 - protein, 435 aa, Helicobacter pylori
  misc_feature (B) LOCATION 1...435
  hypothetical: YES
MGFFKLKEHNTNIATEFRAGLTTFITMIYIVPLNALILSQANMPYEALLSATAIITILSSVFNGLWANTPIAMSVGLGLSAYFSFGLVQGLKLPWQSALGIVALSGAIFVILSFTKFRSWVMRSIPSDLRRAVSAGIGAFIAFIGLKEMHIVVTHKATLVTLGDFSDPHVLLGVVGIILTFALYTLKIKGSFIIAVLITSILAWVLKLAPYPSEFFSMPASISPIAFQLDIKGIFFDASGAFTLVLVPVIITFFVTDLFDSLGTLAGIGHKTDFFNDEEKNKELERTLEADAVASLGSAVVGVSTTTAFIESASGVEEGGRTGLTAVFTGLFFVLTLFCLPLLKAIPSNAIYPVLVVVGVLMFSVLEGVNFKDMAISVSTFLTVVMMPLTFSIADGLAFGFLSYSIIKLVQKDFKALNSGIIILCIISVSVFIFR

SEQ ID NO: 7950 - protein, 95 aa, Helicobacter pylori
  misc_feature (B) LOCATION 1...95
  hypothetical: YES
NQIIEKYVEMNIAHPFLEGNGRATRIWLDLLLKKELKKIALWDRIDKAAYLSAIKRSPVNDLEIKTLLKKHLSSNINDSLTFIKGITQSYYYEGL

SEQ ID NO: 7951 - protein, 94 aa, Helicobacter pylori
  misc_feature (B) LOCATION 1...94
  hypothetical: YES
QIIEKYVEMNIAHPFLEGNGRATRIWLDLLLKKELKKIALWDRIDKAAYLSAIKRSPVNDLEIKTLLKKHLSSNINDSLTFIKGITQSYYYEGL

SEQ ID NO: 7952 - protein, 107 aa, Helicobacter pylori
  misc_feature (B) LOCATION 1...107
  hypothetical: YES
EREKNAPLKITLLKISTMHLDRQSLEKAKHLIQSGLIDTIEVGAIKGLQEIHRFLFEGLYEFAGKIRDKNISNFRFANCLYLDLILPRMESMPQNNFNQIIEKYVEM

SEQ ID NO: 7953 - protein, 175 aa, Helicobacter pylori
  misc_feature (B) LOCATION 1...175
  hypothetical: YES
MHLDRQSLEKAKHLIQSGLIDTIEVGAIKGLQEIHRFLFEGLYEFAGKIRDKNISNFRFANCLYLDLILPRMESMPQNNFNQIIEKYVEMNIAHPFLEGNGRATRIWLDLLLKKELKKIALWDRIDKAAYLSAIKRSPVNDLEIKTLLKKHLSSNINDSLTFIKGITQSYYYEGL

SEQ ID NO: 7954 - protein, 219 aa, Helicobacter pylori
  misc_feature (B) LOCATION 1...219
  hypothetical: YES
MSLATSYNVSNNFSKFNIKRVRGYLICLVCNTPKMIQRGLNGVSFYGCSDYVNKGDCKGVLREINGSMKMVCLHCENTPIMEKVESGRGGAYACKNCNRKFYFIDLAKQNERKKDLEKEKKELLNKIEKQKIKHLERFILAGVKANIKENSFFLGCKNYPKCEWTASMDSQDLKCPKCNRLMKRKKNFKNNEFFTATSLTLNAIEFCLYINLKKKETNV

SEQ ID NO: 7955 - protein, 231 aa, Helicobacter pylori
  misc_feature (B) LOCATION 1...231
  hypothetical: YES
ILFLDLRVVICDMSLATSYNVSNNFSKFNIKRVRGYLICLVCNTPKMIQRGLNGVSFYGCSDYVNKGDCKGVLREINGSMKMVCLHCENTPIMEKVESGRGGAYACKNCNRKFYFIDLAKQNERKKDLEKEKKELLNKIEKQKIKHLERFILAGVKANIKENSFFLGCKNYPKCEWTASMDSQDLKCPKCNRLMKRKKNFKNNEFFTATSLTLNAIEFCLYINLKKKETNV

SEQ ID NO: 7956 - protein, 76 aa, Helicobacter pylori
  misc_feature (B) LOCATION 1...76
  hypothetical: YES
VDIVVQNKVLKLYLKMEFNELQDEIKEKLKIRDVSNIGCPCSEDMEVELETKENIPYCLGLIRQALEKQMGGRNRQ

SEQ ID NO: 7957 - protein, 85 aa, Helicobacter pylori
  misc_feature (B) LOCATION 1...85
  hypothetical: YES
AYKFFKINFVDIVVQNKVLKLYLKMEFNELQDEIKEKLKIRDVSNIGCPCSEDMEVELETKENIPYCLGLIRQALEKQMGGRNRQ

SEQ ID NO: 7958 - protein, 199 aa, Helicobacter pylori
  misc_feature (B) LOCATION 1...199
  hypothetical: YES
ALLNNAKIPTSGRDAVIFGKNNLNPEIVEFIHKNHKRMAIEKASNKEIELLQDANFRHPEDVRASLDHEAITHILKRHGVNSVNVRNGESPITYEDIANYRDIVNNADEIIRAIGKGNKENITAFKQINGYAVVVEQAVNRNSELVLKTMFKSNGNYKNNNAYKKFSSTGLNANARFSHRSSSHGGVEKNILKKLEKSG

SEQ ID NO: 7959 - protein, 319 aa, Helicobacter pylori
  misc_feature (B) LOCATION 1...319
  hypothetical: YES
SITLKRALERSHTISEFSKNLELSVKNAKFSNNTLKIIEELTNGVKQASEEIKAKATKYEKALQELQKIDESKLTKEQQQVLKVFKGELDQTEIKGIDLNDLYILDQGTRHAGAKKILVKHYGVENTGGLTNDELINMSEVIKNGSVLLESFERLKNGFRYGYEWDNNGVKLRLVVDDLNDGNKVFDFYSDRNFKDFRDARPQPSASKDNGTQPITLDGNNPTQKPLTSQEDLLKNTELNNETTQEVKNLSLLEQANAEKLAKLESEAKVSELDFLKVKAQDPRPNVVLKKKLEHARGYAGIFEPCFALVTNPSRTNEP

SEQ ID NO: 7960 - protein, 482 aa, Helicobacter pylori
  misc_feature (B) LOCATION 1...482
  hypothetical: YES
RARAKRKVALKKKLEHERGNAGNIESQTKIEVGEDIPTQIQAQIPKSRVRLNEREIYDLDYAIVKAKDLKPSFTTGGTQKRTDMNEEQIKSIAENFDPKKIFGSGGFEDLPIILHDGQVIAGNHRIAGMLNFTPKSRYIYNKAIKEYYRIDLKPDELLVRVPHQRLDNTEINNLAASSNQGRFNSESDHAIAVLSHYEAKLKELDKKLDADSIYSLKNIVAKNLNFDKATHPNVGDSNLALLMYNMPRTKTQGIELLNRWQKEFSNDIKSYEKVKKMFVDNAGSFHNLIHDMNFPNVSLNAYLSDIMDRSFANLKNYPSTSESLKDLSEKFYKTSSLDMFEKSDQRASDISEILGGAIARFARFDDPSKALFEALKSDNIKKGLKEFKIADVTKDMFNPKSKEFKDIDIYDFTHYLLMVNREPNENNPVLKRLIQAVKGMQKESEKGIKEVSKQAAEETEEGIKRDFSDTNLSINGNLSVIK

SEQ ID NO: 7961 - protein, 912 aa, Helicobacter pylori
  misc_feature (B) LOCATION 1...912
  hypothetical: YES
VKNAKFSNNTLKIIEELTNGVKQASEEIKAKATKYEKALQELQKIDESKLTKEQQQVLKVFKGELDQTEIKGIDLNDLYILDQGTRHAGAKKILVKHYGVENTGGLTNDELINMSEVIKNGSVLLESFERLKNGFRYGYEWDNNGVKLRLVVDDLNDGNKVFDFYSDRNFKDFRDARPQPSASKDNGTQPITLDGNNPTQKPLTSQEDLLKNTELNNETTQEVKNLSLLEQANAEKLAKLESEAKVSEQEFLKAKEQEAKRKVALKKKLEHERGNAGNIESQTKIEVGEDIPTQIQAQIPKSRVRLNEREIYDLDYAIVKAKDLKPSFTTGGTQKRTDMNEEQIKSIAENFDPKKIFGSGGFEDLPIILHDGQVIAGNHRIAGMLNFTPKSRYIYNKAIKEYYRIDLKPDELLVRVPHQRLDNTEINNLAASSNQGRFNSESDHAIAVLSHYEAKLKELDKKLDADSIYSLKNIVAKNLNFDKATHPNVGDSNLALLMYNMPRTKTQGIELLNRWQKEFSNDIKSYEKVKKMFVDNAGSFHNLIHDMNFPNVSLNAYLSDIMDRSFANLKNYPSTSESLKDLSEKFYKTSSLDMFEKSDQSASDISEILGGAIARFARFDDPSKALFESLKSDNIKKGLKDYKIADITKDMFNPDSKEFKDIDIYDFTHYLLMVNREPNENNPVLNRLIQAVKGMQKESEKGIKEVSKQAAEETEKGIKRDFSDTNLSNNEIKALLNNAKIPTSGRDAVIFGKNNLNPEIVEFIHKNHKRMAIEKASNKEIELLQDANFRHPEDVRASLDHEAITHILKRHGVNSVNVRNGESPITYEDIANYRDIVNNADEIIRAIGKGNKENITAFKQINGYAVVVEQAVNRNSELVLKTMFKSNGNYKNNNAYKKFSSTGLNANAKVQP

SEQ ID NO: 7962 - protein, 1044 aa, Helicobacter pylori
  misc_feature (B) LOCATION 1...1044
  hypothetical: YES
NTTAHPTQFLNKLNEFKSDVFTTPKAKEYIDIASGFHKLFKNDAKIAESLKPAITKNLSQGLATTLSGALKYQWTKFTLGTLYRNAPDRVLGIKLPKALNEATAGTALKYHLKRALERSHTISEFSKNLELSVKNAKFSNNTLKIIEELTNGVKQASEEIKAKATKYEKALQELQKIDESKLTKEQQQVLKVFKGELDQTEIKGIDLNDLYILDQGTRHAGAKKILVKHYGVENTGGLTNDELINMSEVIKNGSVLLESFERLKNGFRYGYEWDNNGVKLRLVVDDLNDGNKVFDFYSDRNFKDFRDARPQPSASKDNGTQPITLDGNNPTQKPLTSQEDLLKNTELNNETTQEVKNLSLLEQANAEKLAKLESEAKVSEQEFLKAKEQEAKRKVALKKKLEHERGNAGNIESQTKIEVGEDIPTQIQAQIPKSRVRLNEREIYDLDYAIVKAKDLKPSFTTGGTQKRTDMNEEQIKSIAENFDPKKIFGSGGFEDLPIILHDGQVIAGNHRIAGMLNFTPKSRYIYNKAIKEYYRIDLKPDELLVRVPHQRLDNTEINNLAASSNQGRFNSESDHAIAVLSHYEAKLKELDKKLDADSIYSLKNIVAKNLNFDKATHPNVGDSNLALLMYNMPRTKTQGIELLNRWQKEFSNDIKSYEKVKKMFVDNAGSFHNLIHDMNFPNVSLNAYLSDIMDRSFANLKNYPSTSESLKDLSEKFYKTSSLDMFEKSDQSASDISEILGGAIARFARFDDPSKALFESLKSDNIKKGLKDYKIADITKDMFNPDSKEFKDIDIYDFTHYLLMVNREPNENNPVLNRLIQAVKGMQKESEKGIKEVSKQAAEETEKGIKRDFSDTNLSNNEIKALLNNAKIPTSGRDAVIFGKNNLNPEIVEFIHKNHKRMAIEKASNKEIELLQDANFRHPEDVRASLDHEAITHILKRHGVNSVNVRNGESPITYEDIANYRDIVNNADEIIRAIGKGNKENITAFKQINGYAVVVEQAVNRNSELVLKTMFKSNGNYKNNNAYKKFSSTGLNANAKVQP

SEQ ID NO: 7963 - protein, 199 aa, Helicobacter pylori
  misc_feature (B) LOCATION 1...199
  hypothetical: YES
MELGFNEAERQKILDSNSSLIRNANEVRDKFIQNYAISLKDSNDPQDFLRRVQELRINMQKNFISFDTYYNYLNNLVLASYNRCKQEKTFAESTIKNELTLGEFVAEISDNFNNFMCDEVARISDLVASYLPREYLPPFIDGNMMGVAFQILGIDDFGRKLNEIVQDIGTKYIILSKNKTYLTSLERAKLITQLKLNLE

SEQ ID NO: 7964 - protein, 203 aa, Helicobacter pylori
  misc_feature (B) LOCATION 1...203
  hypothetical: YES
KETAMELGFNEAERQKILDSNSSLIRNANEVRDKFIQNYAISLKDSNDPQDFLRRVQELRINMQKNFISFDTYYNYLNNLVLASYNRCKQEKTFAESTIKNELTLGEFVAEISDNFNNFMCDEVARISDLVASYLPREYLPPFIDGNMMGVAFQILGIDDFGRKLNEIVQDIGTKYIILSKNKTYLTSLERAKLITQLKLNLE

SEQ ID NO: 7965 - protein, 443 aa, Helicobacter pylori
  misc_feature (B) LOCATION 1...443
  hypothetical: YES
MSKLNMTPREIVAYLDEYIIEQKEAKKFIAIALRNRYRRLQLEKSLQEEITPKNILMIGSTGVGKTEIARRMAKIMKLPFVKVEASKYTEVGFVGRDVESMVRDLVNNSVLLVENEHKERLKDKIEEAVVEKIAKKLLPPLPSGVSEEKKQEYANSLLKMQQRIAQGELDSREIEIEVRKKSIEIDSNVPPEILRVQENLIKVFHKEQDKVKKTLSVKEAKEALKAEISDTLLDGEAIKMEGLKRAESSGVIFIDEIDKIAVSSKEGSRQDPSKEGVQRDLLPIVEGSVVNTKYGSIKTEHILFIAAGAFHLSKPSDLIPELQGRFPLRVELENLTEEIMYMILTQTKTSIIKQYQALLKVEGVEIAFEDDAIKELAKLSYNANQKSEDIGARRLHTTIEKVLEDISFEAEDYSGQSVTITKELVQSKLGDLVADENLVKYIL

SEQ ID NO: 7966 - protein, 448 aa, Helicobacter pylori
  misc_feature (B) LOCATION 1...448
  hypothetical: YES
NFGALMSKLNMTPREIVAYLDEYIIEQKEAKKFIAIALRNRYRRLQLEKSLQEEITPKNILMIGSTGVGKTEIARRMAKIMKLPFVKVEASKYTEVGFVGRDVESMVRDLVNNSVLLVENEHKERLKDKIEEAVVEKIAKKLLPPLPSGVSEEKKQEYANSLLKMQQRIAQGELDSREIEIEVRKKSIEIDSNVPPEILRVQENLIKVFHKEQDKVKKTLSVKEAKEALKAEISDTLLDGEAIKMEGLKRAESSGVIFIDEIDKIAVSSKEGSRQDPSKEGVQRDLLPIVEGSVVNTKYGSIKTEHILFIAAGAFHLSKPSDLIPELQGRFPLRVELENLTEEIMYMILTQTKTSIIKQYQALLKVEGVEIAFEDDAIKELAKLSYNANQKSEDIGARRLHTTIEKVLEDISFEAEDYSGQSVTITKELVQSKLGDLVADENLVKYIL

SEQ ID NO: 7967 - protein, 45 aa, Helicobacter pylori
  misc_feature (B) LOCATION 1...45
  hypothetical: YES
LEAQAYSLLAFPVYAQNSRRFQSFYPYSIRPLRYPLRSIGNWKRL

SEQ ID NO: 7968 - protein, 47 aa, Helicobacter pylori
  misc_feature (B) LOCATION 1...47
  hypothetical: YES
VWGICLMPFSLISSKVSLKRLMSIASPGSILFLMPSMPAIKIAPKAR

SEQ ID NO: 7969 - protein, 330 aa, Helicobacter pylori
  misc_feature (B) LOCATION 1...330
  hypothetical: YES
MTEDRLSAEDKKFLEVERALKEAALNPLRHATEELFGDFLKMENITEICYNGDKVVWVLKNNGEWQPFDVRNKKAFSLSRLMHFARCCASFKKKTIDNYENPILSSNLANGERVQIVLSPVTVNDETISISIRIPSKTTYPHSFFEEQGFYNLLDNKEQAISAIKDGIAIGKNVIVCGGTGSGKTTYIKSIMEFIPKEERIISIEDTEEIVFKHHKNYTQLFFGGNITSADCLKSCLRMRPDRIILGELRSSEAYDFYNVLCSGHKGTLTTLHAGSSEEAFIRLANMSSSNSAARNIKFESLIEGFKDLIDMIVHINHHKQCDEFYIKHR

SEQ ID NO: 7970 - protein, 335 aa, Helicobacter pylori
  misc_feature (B) LOCATION 1...335
  hypothetical: YES
IWNKNMTEDRLSAEDKKFLEVERALKEAALNPLRHATEELFGDFLKMENITEICYNGDKVVWVLKNNGEWQPFDVRNKKAFSLSRLMHFARCCASFKKKTIDNYENPILSSNLANGERVQIVLSPVTVNDETISISIRIPSKTTYPHSFFEEQGFYNLLDNKEQAISAIKDGIAIGKNVIVCGGTGSGKTTYIKSIMEFIPKEERIISIEDTEEIVFKHHKNYTQLFFGGNITSADCLKSCLRMRPDRIILGELRSSEAYDFYNVLCSGHKGTLTTLHAGSSEEAFIRLANMSSSNSAARNIKFESLIEGFKDLIDMIVHINHHKQCDEFYIKHR

SEQ ID NO: 7971 - protein, 199 aa, Helicobacter pylori
  misc_feature (B) LOCATION 1...199
  hypothetical: YES
MSNNMRKLFSMIANSKDKKEKLIESLQENELLNTDEKKKIIDQIKTMHDFFKQMHTNKGALDKVLRNYMKDYRAVIKSIGVDKFKKVYRLLESETMELLHAIAENPNFLFSKFDRSILGIFLPFFSKPIMFKMSIREMDSQIELYGTKLPPLKLFVMTDEEVNFYANLKTIEQYNDYVRDLLMKFDLEKYMEEKGVQNA

SEQ ID NO: 7972 - protein, 211 aa, Helicobacter pylori
  misc_feature (B) LOCATION 1...211
  hypothetical: YES
RETKSIERIKNDMSNNMRKLFSMIANSKDKKEKLIESLQENELLNTDEKKKIIDQIKTMHDFFKQMHTNKGALDKVLRNYMKDYRAVIKSIGVDKFKKVYRLLESETMELLHAIAENPNFLFSKFDRSILGIFLPFFSKPIMFKMSIREMDSQIELYGTKLPPLKLFVMTDEEVNFYANLKTIEQYNDYVRDLLMKFDLEKYMEEKGVQNA

SEQ ID NO: 7973 - protein, 86 aa, Helicobacter pylori
  misc_feature (B) LOCATION 1...86
  hypothetical: YES
VPSDLEKPTIIYPCVWDYRVIMTTNDTSVLKELLETYQRPFKLELKNTSKNAKFYSFNVSMEVSNEAERNEIFQKISQLEVVAHAL

SEQ ID NO: 7974 - protein, 119 aa, Helicobacter pylori
  misc_feature (B) LOCATION 1...119
  hypothetical: YES
SLSKSLLQKSSLALSTALHTALLPFLNCLRSFLVPSDLEKPTIIYPCVWDYRVIMTTNDTSVLKELLETYQRPFKLELKNTSKNAKFYSFNVSMEVSNEAERNEIFQKISQLEVVAHAL

SEQ ID NO: 7975 - protein, 115 aa, Helicobacter pylori
  misc_feature (B) LOCATION 1...115
  hypothetical: YES
MADTINTTETTHETKKPNAFVNFFKNNLTDKRYDSLGLIGAGVLCCVLSGAMGIVGIIFVAIGIFLSFSNINLVKLVEKLSKKQPKAATTVNNETQKSQAASVTNEPTEAKETKD

SEQ ID NO: 7976 - protein, 126 aa, Helicobacter pylori
  misc_feature (B) LOCATION 1...126
  hypothetical: YES
QIENIPYGGNTMADTINTTETTHETKKPNAFVNFFKNNLTDKRYDSLGLIGAGVLCCVLSGAMGIVGIIFVAIGIFLSFSNINLVKLVEKLSKKQPKAATTVNNETQKSQAASVTNEPTEAKETKD

SEQ ID NO: 7977 - protein, 180 aa, Helicobacter pylori
  misc_feature (B) LOCATION 1...180
  hypothetical: YES
MFEATTILGYRGEFDNKKFALIGGDGQVTLGNCVVKANAIKIRSLYHNQVLSGFAGSTADAFSLFDMFERILESKKGDLFKSVVDFSKEWRKDKYLRRLEAMMIVLNFDHVFILSGTGDVLEAEDNKIAAIGSGGNFALSAARALDHFAHLEPRKLVEESLKIAGDLCIYTNTNIKILEL

SEQ ID NO: 7978 - protein, 181 aa, Helicobacter pylori
  misc_feature (B) LOCATION 1...181
  hypothetical: YES
KMFEATTILGYRGEFDNKKFALIGGDGQVTLGNCVVKANAIKIRSLYHNQVLSGFAGSTADAFSLFDMFERILESKKGDLFKSVVDFSKEWRKDKYLRRLEAMMIVLNFDHVFILSGTGDVLEAEDNKIAAIGSGGNFALSAARALDHFAHLEPRKLVEESLKIAGDLCIYTNTNIKILEL

SEQ ID NO: 7979 - protein, 184 aa, Helicobacter pylori
  misc_feature (B) LOCATION 1...184
  hypothetical: YES
LECFFKNSIERVFSKIADTHIIDKLNNQGRRVEEVCFSWVRGFLVAEFFKDFIACLFGAQKETIKFFGGDNFESIESFKRSPKADFLLDDHLLLEVQSGFQGINDIKEHKVLEAQRRLITDKIPTIVVHFDLFNGQVACVEISKIKENDLNWITRQQMEGQSVFNISQNFFDHKITEMPNKPLL

SEQ ID NO: 7980 - protein, 205 aa, Helicobacter pylori
  misc_feature (B) LOCATION 1...205
  hypothetical: YES
RLIEIFSAINSIYCFKYNGYELECFFKNSIERVFSKIADTHIIDKLNNQGRRVEEVCFSWVRGFLVAEFFKDFIACLFGAQKETIKFFGGDNFESIESFKRSPKADFLLDDHLLLEVQSGFQGINDIKEHKVLEAQRRLITDKIPTIVVHFDLFNGQVACVEISKIKENDLNWITRQQMEGQSVFNISQNFFDHKITEMPNKPLL

SEQ ID NO: 7981 - protein, 1819 aa, Helicobacter pylori
  misc_feature (B) LOCATION 1...1819
  hypothetical: YES
MNEENDKLETSKKAQQDSPQDLSNEEATEANHFEDLLKESTESSDNHLDNPTETKTHFDEDKLEETQTQMDSGGNETSESSNGSLADKLFKKARKLVDDKRPFTQQKSLDEETQKLNEEDDQENNEHQEETQTDLIDDETSEKTQQDSPQDLSNEEATEANHFEDLLKESTESSDNHLDNPTESSDNHLDNPTETKTQETKTHFDEDKPEEITDDSNDQEIIKGSKKKYIIGGIVVAVLIVIILFSRSIFHYFVPLEDKSSRFSKDRNLYVNDEIQIRQEYNRLLKERNEKGNMIDKNLFFNDDPNRTLYNYLNIAEIEDKNPLRAFYECISNGGNYEECLKLIKDKKLQDQMKKTLEAYNDCIKNAKTEEERIKCLDLIKDENLKKSLLNQQKVQVALDCLKNAKTDEERKECLKLINDPEIREKFRKELELQKELQEYKDCIKNAKTEAEKNECLKGLSKEAIERLKQQALDCLKNAKTDEERKECLKNIPQDLQKELLADMSVKAYKDCVSRARNEKEKQECEKLLTPEAKKLLENQALDCLKNAKTDEERKECLKNLPKDLQSDILAKESLKAYKDCASQAKTEAEKKECEKLLTPEAKKLLEEEAKESVKAYLDCVSQAKTEAEKKECEKLLTPEAKKKLEEAKKSVRAYLDCVSKAKNEAERKECEKLLTPEAKKLLENQALDCLKNAKTDEERKECLKDLPKDLQKKVLAKESVRVYLDCVSKAKNEAERKECEKLLTPEARKLLEEAKKSVKAYKDCVLRARNEKEKQECEKLLTPEARKLLEESKKSVKAYLDCVSKAKNEAERKECEKLLTPEARKLLEEAKESVKAYKDCVSRARNEKEKQECEKLLTPEARKLLEESKKSVKAYLDCVSKAKNEAERKECEKLLTPEARKLLEEAKESVKAYKDCVSRARNEKEKQECEKLLTPEAKKLLENQALDCLKNAKTEAEKKRCVKDLPKDLQKKVLAKESVRVYLDCVSKAKNEAERKECEKLLTPEARKLLEEAKESVKAYKDCVSRARNEKEKQECEKLLTPEARKLLEQEVKKSVKAYLDCVSRARNEKEKQECEKLLTPEARKLLENQALDCLKNAKTEAEKKRCVKDLPKDLQKKVLAKESVKAYLDCVSRARNEKEKKECEKLLTPEARKLLEESKKSVKAYLDCVSKAKNEAEKKECEKLLTPEARKLLEEAKESVKAYKDCVSRARNEKEKQECEKLLTPEARKLLEQEVKKSVKAYLDCVSRARNEKEKQECEKLLTPEARKFLEKQRQQKDKAIKDCLKNADPNDRAAIMKCLDGLSDEEKLKYLQEAREKAVLDCLKTARTDEEKRKCQNLYSDLIQEIQNKKAQNKQNQLSKTERLHQASECLDNLDDPTDQEAIEQCLEGLSDSERALILGIKRQADEVDRIYSDLRSRKTFDNMAAKGYPLLPMDFKNGGDIATINATNVDADKIASDNPIYASIEPDITKQYETEKTIKDKSLEAKLAKALGGDKKDDDKEKGKKPTAETKAESNKIDKDVAETAKNISEIALKNKKEKSGDFVDENGNPIDDKKKEEKQDETSPVKQAFIGKSDPTFVLAQYTPIEITLTSKVDATLTGIVSGVVAKDVWNMNGTMILLDKGTKVYGNYQSVKGGTPIMTRLMIVFTKAITPDGVIIPLANAQAAGMLGEAGVDGYVNNHFMKRIGFAVIASVVNSFLQTAPIIALDKLIGLGKGRSERTPEFNYALGQAINGSMQSSAQMSNQILGQLMNIPPSFYKNEGDSIKILTMDDIDFSGVYDVKITNKSVVDEIIKQSTKTLSREHEEITTSPKGGN

SEQ ID NO: 7982 - protein, 1820 aa, Helicobacter pylori
  misc_feature (B) LOCATION 1...1820
  hypothetical: YES
DMNEENDKLETSKKAQQDSPQDLSNEEATEANHFEDLLKESTESSDNHLDNPTETKTHFDEDKLEETQTQMDSGGNETSESSNGSLADKLFKKARKLVDDKRPFTQQKSLDEETQKLNEEDDQENNEHQEETQTDLIDDETSEKTQQDSPQDLSNEEATEANHFEDLLKESTESSDNHLDNPTESSDNHLDNPTETKTQETKTHFDEDKPEEITDDSNDQEIIKGSKKKYIIGGIVVAVLIVIILFSRSIFHYFVPLEDKSSRFSKDRNLYVNDEIQIRQEYNRLLKERNEKGNMIDKNLFFNDDPNRTLYNYLNIAEIEDKNPLRAFYECISNGGNYEECLKLIKDKKLQDQMKKTLEAYNDCIKNAKTEEERIKCLDLIKDENLKKSLLNQQKVQVALDCLKNAKTDEERKECLKLINDPEIREKFRKELELQKELQEYKDCIKNAKTEAEKNECLKGLSKEAIERLKQQALDCLKNAKTDEERKECLKNIPQDLQKELLADMSVKAYKDCVSRARNEKEKQECEKLLTPEAKKLLENQALDCLKNAKTDEERKECLKNLPKDLQSDILAKESLKAYKDCASQAKTEAEKKECEKLLTPEAKKLLEEEAKESVKAYLDCVSQAKTEAEKKECEKLLTPEAKKKLEEAKKSVRAYLDCVSKAKNEAERKECEKLLTPEAKKLLENQALDCLKNAKTDEERKECLKDLPKDLQKKVLAKESVRVYLDCVSKAKNEAERKECEKLLTPEARKLLEEAKKSVKAYKDCVSRARNEKEKQECEKLLTPEARKLLEESKKSVKAYLDCVSKAKNEAERKECEKLLTPEARKLLEEAKESVKAYKDCVSRARNEKEKQECEKLLTPEARKLLEESKKSVKAYLDCVSKAKNEAERKECEKLLTPEARKLLEEAKESVKAYKDCVSRARNEKEKQECEKLLTPEAKKLLENQALDCLKNAKTEAEKKRCVKDLPKDLQKKVLAKESVRVYLDCVSKAKNEAERKECEKLLTPEARKLLEEAKESVKAYKDCVSRARNEKEKQECEKLLTPEARKLLEQEVKKSVKAYLDCVSRARNEKEKQECEKLLTPEARKLLENQALDCLKNAKTEAEKKRCVKDLPKDLQKKVLAKESVKAYLDCVSRARNEKEKKECEKLLTPEARKLLEESKKSVKAYLDCVSKAKNEAEKKECEKLLTPEARKLLEEAKESVKAYKDCVSRARNEKEKQECEKLLTPEARKLLEQEVKKSVKAYLDCVSRARNEKEKQECEKLLTPEARKFLEKQRQQKDKAIKDCLKNADPNDRAAIMKCLDGLSDEEKLKYLQEAREKAVLDCLKTARTDEEKRKCQNLYSDLIQEIQNKKAQNKQNQLSKTERLHQASECLDNLDDPTDQEAIEQCLEGLSDSERALILGIKRQADEVDRIYSDLRSRKTFDNMAAKGYPLLPMDFKNGGDIATINATNVDADKIASDNPIYASIEPDITKQYETEKTIKDKSLEAKLAKALGGDKKDDDKEKGKKPTAETKAESNKIDKDVAETAKNISEIALKNKKEKSGDFVDENGNPIDDKKKEEKQDETSPVKQAFIGKSDPTFVLAQYTPIEITLTSKVDATLTGIVSGVVAKDVWNMNGTMILLDKGTKVYGNYQSVKGGTPIMTRLMIVFTKAITPDGVIIPLANAQAAGMLGEAGVDGYVNNHFMKRIGFAVIASVVNSFLQTAPIIALDKLIGLGKGRSERTPEFNYALGQAINGSMQSSAQMSNQILGQLMNIPPSFYKNEGDSIKILTMDDIDFSGVYDVKITNKSVVDEIIKQSTKTLSREHEEITTSPKGGN

SEQ ID NO: 7983 - protein, 301 aa, Helicobacter pylori
  misc_feature (B) LOCATION 1...301
  hypothetical: YES
MKTKAGFVALIGKPNAGKSTLLNTLLNAHLALVSHKANATRKLMKCIVPFKDKEGYESQIIFLDTPGLHHQEKLLNQCMLSQALKAMGDAELRVFLASVHDDLKGYEEFLSLCQKPHILALSKIDTATHKQVLQKLQEYQKYSSQFLALVPLSAKKSQNLNALLECISKHLSPSAWLFEKDLMSDEKMRDIYKEIIRESLFDFLSDEIPYESDVMIDKFIEEERIDKVYARIIVEKESQKKIVIGKNGVNIKRIGTNARLKMQEVGEKKVFLNLQVIAQKSWSKEEKSLQKLGYIYQRNRD

SEQ ID NO: 7984 - protein, 309 aa, Helicobacter pylori
  misc_feature (B) LOCATION 1...309
  hypothetical: YES
KFSEVYFIMKTKAGFVALIGKPNAGKSTLLNTLLNAHLALVSHKANATRKLMKCIVPFKDKEGYESQIIFLDTPGLHHQEKLLNQCMLSQALKAMGDAELRVFLASVHDDLKGYEEFLSLCQKPHILALSKIDTATHKQVLQKLQEYQKYSSQFLALVPLSAKKSQNLNALLECISKHLSPSAWLFEKDLMSDEKMRDIYKEIIRESLFDFLSDEIPYESDVMIDKFIEEERIDKVYARIIVEKESQKKIVIGKNGVNIKRIGTNARLKMQEVGEKKVFLNLQVIAQKSWSKEEKSLQKLGYIYQRNRD

SEQ ID NO: 7985 - protein, 58 aa, Helicobacter pylori
  misc_feature (B) LOCATION 1...58
  hypothetical: YES
MGCFSCIDCVSHSVTSIRYILNLLLMKQIHAIIAKNMKPSPYCLSLLCCCLQSKKEMI

SEQ ID NO: 7986 - protein, 80 aa, Helicobacter pylori
  misc_feature (B) LOCATION 1...80
  hypothetical: YES
IITLISQIVFEKIYKSVWLLCFMGCFSCIDCVSHSVTSIRYILNLLLMKQIHAIIAKNMKPSPYCLSLLCCCLQSKKEMI

SEQ ID NO: 7987 - protein, 41 aa, Helicobacter pylori
  misc_feature (B) LOCATION 1...41
  hypothetical: YES
MLILTCDITQTNDLFVYVKQRIENTYQGIKEFLSKKHQSIV

SEQ ID NO: 7988 - protein, 55 aa, Helicobacter pylori
  misc_feature (B) LOCATION 1...55
  hypothetical: YES
LRTQLATMSAMLKGANGVINGVNSMTGGFFAGSDILLGVMEGYSSALSTWGGMSK

SEQ ID NO: 7989 - protein, 93 aa, Helicobacter pylori
  misc_feature (B) LOCATION 1...93
  hypothetical: YES
SHSGGCTSQTKNRSSRIKSHRGSIYAKEKAVQAQIEGDLRTQLATMSAMLKGANGVINGVNSMTGGFFAGSDILLGVMEGYSSALSTWGGMSK

SEQ ID NO: 7990 - protein, 256 aa, Helicobacter pylori
  misc_feature (B) LOCATION 1...256
  hypothetical: YES
MIVEKQKINTQTEIQNMQIALQKNNEIIKLKMNQQNALLEALKNSFEPSVTLKTQMEMLSQALGSSSDNAQYIAYNTIGIKAFEETLKGFETWLKTAMQKATLIDYNSLTGQALFQSTIYAPALSFFSSMGAPFGIIETFTLAPTKCPYLDGLKISACLMEQVIQNYRMIVALIQNKLSDADFQNIAYLNGINGEIKTLKGSVDLNALIEVAILNAENHLNYIENLEKKADLWEEQLKLERETTARNIASSKVIVK

SEQ ID NO: 7991 - protein, 263 aa, Helicobacter pylori
  misc_feature (B) LOCATION 1...263
  hypothetical: YES
HLGGNVKMIVEKQKINTQTEIQNMQIALQKNNEIIKLKMNQQNALLEALKNSFEPSVTLKTQMEMLSQALGSSSDNAQYIAYNTIGIKAFEETLKGFETWLKTAMQKATLIDYNSLTGQALFQSTIYAPALSFFSSMGAPFGIIETFTLAPTKCPYLDGLKISACLMEQVIQNYRMIVALIQNKLSDADFQNIAYLNGINGEIKTLKGSVDLNALIEVAILNAENHLNYIENLEKKADLWEEQLKLERETTARNIASSKVIVK

SEQ ID NO: 7992 - protein, 381 aa, Helicobacter pylori
  misc_feature (B) LOCATION 1...381
  hypothetical: YES
VKCFLSIFSFLTFCGLSLNGAGAVITLEPALKAIQADAQAKQKTAQAELKAIEAQSNAKEKAIQAQIEGELRTQLATMSAMLKGANGVINGVNSMTGGFFAGSDILLGVMEGYSSALSALGGNVKMIVEKQKINTQTEIQNMQIALQKNNEIIKLKMNQQNALLEALKNSFEPSVTLKTQMEMLSQALGSSSDNAQYIAYNTIGIKAFEETLKGFETWLKTAMQKATLIDYNSLTGQALFQSTIYAPALSFFSSMGAPFGIIETFTLAPTKCPYLDGLKISACLMEQVIQNYRMIVALIQNKLSDADFQNIAYLNGINGEIKTLKGSVDLNALIEVAILNAENHLNYIENLEKKADLWEEQLKLERETTARNIASSKVIVK

SEQ ID NO: 7993 - protein, 80 aa, Helicobacter pylori
  misc_feature (B) LOCATION 1...80
  hypothetical: YES
MSYFKNIFNQKSLIDDSSVYLEPCSSSNFIELKRMHYNEENTKKTWDIIKSLDSVAVLLYEKESDCFVIVKQFRPAIYAR

SEQ ID NO: 7994 - protein, 88 aa, Helicobacter pylori
  misc_feature (B) LOCATION 1...88
  hypothetical: YES
ARSGSTIDGYTYELCAGLVDKANKSLEETACEEALEECGYQISPKNLETIGQFYSATGLSGSLQTLYYAEAHEGLKVSKGGGIDTRKD

SEQ ID NO: 7995 - protein, 91 aa, Helicobacter pylori
  misc_feature (B) LOCATION 1...91
  hypothetical: YES
KKFILSFRGFLMSYFKNIFNQKSLIDDSSVYLEPCSSSNFIELKRMHYNEENTKKTWDIIKSLDSVAVLLYEKESDCFVIVKQFRPAIYAR

SEQ ID NO: 7996 - protein, 114 aa, Helicobacter pylori
  misc_feature (B) LOCATION 1...114
  hypothetical: YES
LCAGLVDKANKSLEEIACEEALEECGYQISPKNLETIGQFYSATGLSGSLQTLYYAEAHEGLKVSKGGGIDTEKIEVLFLERSKALDFIMDFQYAKTTGLSLAILWHLKKFKNV

SEQ ID NO: 7997 - protein, 212 aa, Helicobacter pylori
  misc_feature (B) LOCATION 1...212
  hypothetical: YES
MSYFKNIFNQKSLIDDSSVYLEPCSSSNFIELKRMHYNEENTKKTWDIIKSLDSVAVLLYEKESDCFVIVKQFRPAIYARNFYFKRDQDQTIDGYTYELCAGLVDKANKSLEEIACEEALEECGYQISPKNLETIGQFYSATGLSGSLQTLYYAEAHEGLKVSKGGGIDTEKIEVLFLERSKALDFIMDFQYAKTTGLSLAILWHLKKFKNV

SEQ ID NO: 7998 - protein, 133 aa, Helicobacter pylori
  misc_feature (B) LOCATION 1...133
  hypothetical: YES
MRCRVYYEDTDSEGVVYHANYLKYCERARSEFFFKQNVLPENEEGVFVIRSIKADFFTPASLGQVLEIRTQIKELRKVFVVLFQEIYCIQNASLEPMKPFKVFASEIKFGFVNRSTYSPIAIPKLFKELLSAV

SEQ ID NO: 7999 - protein, 136 aa, Helicobacter pylori
  misc_feature (B) LOCATION 1...136
  hypothetical: YES
GELMRCRVYYEDTDSEGVVYHANYLKYCERARSEFFFKQNVLPENEEGVFVIRSIKADFFTPASLGQVLEIRTQIKELRKVFVVLFQEIYCIQNASLEPMKPFKVFASEIKFGFVNRSTYSPIAIPKLFKELLSAV

SEQ ID NO: 8000 - protein, 94 aa, Helicobacter pylori
  misc_feature (B) LOCATION 1...94
  hypothetical: YES
GVKMHISGVKTAFKIADVEYVKDSTKLNFNYLKDLKDENNQSLSQNILTQNVARAYLIVVDGEIKKIGGSQADGGIKSTLNIYKDGGVKGRSRH

SEQ ID NO: 8001 - protein, 175 aa, Helicobacter pylori
  misc_feature (B) LOCATION 1...175
  hypothetical: YES
MHISGVKTAFKIADVEYVKDSTKLNFNYLKDLKDENNQSLSQNILTQNVARAYLIVVDGEIKKIGGSQADGGIKSTLNIYKDGGVKGRSSIRSFGVWYFLYHTILTGAKIEFYMIYQPNFETQVKGLFGFCAIKDASISYKLLEQACLTDYRNNNNDALPEWNAREQGKELAKRY

SEQ ID NO: 8002 - protein, 26 aa, Helicobacter pylori
  misc_feature (B) LOCATION 1...26
  hypothetical: YES
LRFLGFVIDSCGRFRLFFGQFFNQFH

SEQ ID NO: 8003 - protein, 60 aa, Helicobacter pylori
  misc_feature (B) LOCATION 1...60
  hypothetical: YES
ICEIFPYSFFSQNRCSASIFSLFSFSWFVGNACCLRFLGFVIDSCGRFRLFFGQFFNQFH

SEQ ID NO: 8004 - protein, 59 aa, Helicobacter pylori
  misc_feature (B) LOCATION 1...59
  hypothetical: YES
LTVVAALGCFLDNFSTNFTKLILEKDKKIPIATKIIPTIPIAPLKTQHKTPAPMRPNES

SEQ ID NO: 8005 - protein, 65 aa, Helicobacter pylori
  misc_feature (B) LOCATION 1...65
  hypothetical: YES
DFWVSLLTVVAALGCFLDNFSTNFTKLILEKDKKIPIATKIIPTIPIAPLKTQHKTPAPMRPNES

SEQ ID NO: 8006 - protein, 86 aa, Helicobacter pylori
  misc_feature (B) LOCATION 1...86
  hypothetical: YES
LREYYIEFVKNNTNLLQNASQMILNQSGLATSTYDTQAISNISSLYNYNIVANKSFLKSHLTYLDYIKDKLKGQKDSYLTERCRLK

SEQ ID NO: 8007 - protein, 115 aa, Helicobacter pylori
  misc_feature (B) LOCATION 1...115
  hypothetical: YES
MTTPACPIGDKVLAVYCYAEKVAEILREYYIEFVKNNTNLLQNASQMILNQSGLATSTYDTQAISNISSLYNYNIVANKSFLKSHLTYLDYIKDKLKGQKDSYLTERVQTKIIVK

SEQ ID NO: 8008 - protein, 124 aa, Helicobacter pylori
  misc_feature (B) LOCATION 1...124
  hypothetical: YES
SLATNALSSRVNPMTTPACPIGDKVLAVYCYAEKVAEILREYYIEFVKNNTNLLQNASQMILNQSGLATSTYDTQAISNISSLYNYNIVANKSFLKSHLTYLDYIKDKLKGQKDSYLTERCRLK

SEQ ID NO: 8009 - protein, 127 aa, Helicobacter pylori
  misc_feature (B) LOCATION 1...127
  hypothetical: YES
LATNALTSGVNPMTTPACPIGDKVLAVYCYAEKVAEILREYYIEFVKNNTNLLQNASQMILNQSGLATSTYDTQAISNISSLYNYNIVANKSFLKSHLTYLDYIKDKLKGQKDSYLTERVQTKIIVK

SEQ ID NO: 8010 - protein, 35 aa, Helicobacter pylori
  misc_feature (B) LOCATION 1...35
  hypothetical: YES
MGIFFNFIAKPTLISKPPSAAITLSPTFKPLGCKI

SEQ ID NO: 8011 - protein, 86 aa, Helicobacter pylori
  misc_feature (B) LOCATION 1...86
  hypothetical: YES
MNTKEPHKRLVQGKVISKFAEKSAVILVERKVVHEKYRKIVKKFKKYTIHDENNQVKVGDFVSAIECRPLSKTKSFTLKEILVVGV

SEQ ID NO: 8012 - protein, 87 aa, Helicobacter pylori
  misc_feature (B) LOCATION 1...87
  hypothetical: YES
AMNTKEPHKRLVQGKVISKFAEKSAVILVERKVVHEKYRKIVKKFKKYTIHDENNQVKVGGFVSAIECRPLSKTKSFTLKEILVVGV

SEQ ID NO: 8013 - protein, 105 aa, Helicobacter pylori
  misc_feature (B) LOCATION 1...105
  hypothetical: YES
MINNNKAMLEQYNVSKLASEEKLKALAQNKNDKLLKEQTDSFEALLLKFMLDSAMKMDNPLYPKAPGDEIYASMYKDTLSKELSGNFGYSEMLFNFLKEQEKQKP

SEQ ID NO: 8014 - protein, 117 aa, Helicobacter pylori
  misc_feature (B) LOCATION 1...117
  hypothetical: YES
KKAARLARNGDTMINNNKAMLEQYNVSKLASEEKLKALAQNKNDKLLKEQTDSFEALLLKFMLDSAMKMDNPLYPKAPGDEIYASMYKDTLSKELSGNFGYSEMLFNFLKEQEKQKP

SEQ ID NO: 8015 - protein, 85 aa, Helicobacter pylori
  misc_feature (B) LOCATION 1...85
  hypothetical: YES
VHNFHWNVKGTDFFNVHKATEEIYEGFADMFDDLAERIVQLGHHPLVTLSEAIKLTRVKEETKTSFHSKDIFKEILEDYKHLEKE

SEQ ID NO: 8016 - protein, 144 aa, Helicobacter pylori
  misc_feature (B) LOCATION 1...144
  hypothetical: YES
MKTFEILKHLQADAIVLFMKVHNFHWNVKGTDFFNVHKATEEIYEGFADMFDDLAERIVQLGHHPLVTLSEAIKLTRVKEETKTSFHSKDIFKEILEDYKHLEKEFKELSNTAEKEGDKVTVTYADDQLAKLQKSIWMLEAHLA

SEQ ID NO: 8017 - protein, 155 aa, Helicobacter pylori
  misc_feature (B) LOCATION 1...155
  hypothetical: YES
KPKTILKKGLLMKTFEILKHLQADAIVLFMKVHNFHWNVKGTDFFNVHKATEEIYEGFADMFDDLAERIVQLGHHPLVTLSEAIKLTRVKEETKTSFHSKDIFKEILEDYKHLEKEFKELSNTAEKEGDKVTVTYADDQLAKLQKSIWMLEAHLA

SEQ ID NO: 8018 - protein, 94 aa, Helicobacter pylori
  misc_feature (B) LOCATION 1...94
  hypothetical: YES
MRDYSELEIFEGNPLDKWNDIIFHASKKLSKKELERLLELLALLETFIEKEDLEERFESFAKALRMDEELQQKIESRKTDIVIQSMANILSGNE

SEQ ID NO: 8019 - protein, 127 aa, Helicobacter pylori
  misc_feature (B) LOCATION 1...127
  hypothetical: YES
SYRNLCGRSISQVAKIHLDARSPFSLSQQKEASMRDYSELEIFEGNPLDKWNDIIFHASKKLSKKELERLLELLALLETFIEKEDLEERFESFAKALRMDEELQQKIESRKTDIVIQSMANILSGNE

SEQ ID NO: 8020 - protein, 131 aa, Helicobacter pylori
  misc_feature (B) LOCATION 1...131
  hypothetical: YES
MNELIRYGLIFLVFLKAFGLDYGIDKTLELKKDEAFRAVIKDTSNEQTKEITLYWTLYANKGLVINMRFNHFPYQFILYTDHARNTYNLKVFEENFSSNSVLSLVFKDFKEDKATLRLLAPMPLIFSPKEP

SEQ ID NO: 8021 - protein, 141 aa, Helicobacter pylori
  misc_feature (B) LOCATION 1...141
  hypothetical: YES
SNPWRIFSAGMNELIRYGLIFLVFLKAFGLDYGIDKTLELKKDEAFRAVIKDTSNEQTKEITLYWTLYANKGLVINMRFNHFPYQFILYTDHARNTYNLKVFEENFSSNSVLSLVFKDFKEDKATLRLLAPMPLIFSPKEP

SEQ ID NO: 8022 - protein, 169 aa, Helicobacter pylori
  misc_feature (B) LOCATION 1...169
  hypothetical: YES
FLKRARKTKTMKKSKRLKRPYLKNSHLKHSDKASSFKGLLENENNVISLENFKPKESEDLLENFSNKKDMQELLELLNQFILQSYKVEKEFKDYKALYEWVIEILPQAIWVMNENGSFFYKNSLANQSHEVFNKAKLGNFNTEIEHENKSYLVQQNSIQGKANHHRNRY

SEQ ID NO: 8023 - protein, 239 aa, Helicobacter pylori
  misc_feature (B) LOCATION 1...239
  hypothetical: YES
SSKTAFRAKQIITATDISAQKRQERLASMGKISAHLAHEIRNPVGSISLLASVLLKHANEKTKPIVVELQKALWRVERIIKATLLFSKGIQANRTKQSLKTLESDLKEALNCYTYSKDIDFLFNFSDEEGFFDFDLMGIVLQNFLYNAIDAIEALEESEQGQVKIEAFIQNEFIVFTIIDNGKEVENKSALFEPFETTKLKGNGLGLALSLQVVKAHEGSIALLENQEKTFEIKILNAS

SEQ ID NO: 8024 - protein, 381 aa, Helicobacter pylori
  misc_feature (B) LOCATION 1...381
  hypothetical: YES
MKKSKRLKRPYLKNSHLKHSDKASSFKGLLENENNVISLENFKPKESEDLLENFSNKKDMQELLELLNQFILQSYKVEKEFKDYKALYEWVIEILPQAIWVMNENGSFFYKNSLANQSHEVFNKAKLGNFNTEIEHENKSYLVQQNSIQGKQIITATDISAQKRQERLASMGKISAHLAHEIRNPVGSISLLASVLLKHANEKTKPIVVELQKALWRVERIIKATLLFSKGIQANRTKQSLKTLESDLKEALNCYTYSKDIDFLFNFSDEEGFFDFDLMGIVLQNFLYNAIDAIEALEESEQGQVKIEAFIQNEFIVFTIIDNGKEVENKSALFEPFETTKLKGNGLGLALSLQVVKAHEGSIALLENQEKTFEIKILNAS

SEQ ID NO: 8025 - protein, 131 aa, Helicobacter pylori
  misc_feature (B) LOCATION 1...131
  hypothetical: YES
GICMQEKRLKAIQNKIASWIKEIESGFIDALFSKIGPSKMLRSKLMLALLDEKTDAILLDKALNLCAIVEMIQTASLLHDDVIDKATMRRKLPSINALFGNFNAVMLGDVFYSKAFFELSKMGESIAQAPL

SEQ ID NO: 8026 - protein, 205 aa, Helicobacter pylori
  misc_feature (B) LOCATION 1...205
  hypothetical: YES
CLGMCFILKPFLSCLKWANPSLKPLSNAVLRLSRGEIEDVFVGECFNSDKQKYWRILEDKTAHFIEASLKSMAILLNKDAKMYADFGLHFGMAFQIIDDLLDITQDANTLGKPNFSDFKEGKTTLPYLLLYEKLNQHEQGLLISYFKQDSHEIIEWTKEKFKQHGIIEETLKIAQVYSKKALEAIKGENNLILEKLAQDVIYRTF

SEQ ID NO: 8027 - protein, 243 aa, Helicobacter pylori
  misc_feature (B) LOCATION 1...243
  hypothetical: YES
MQEKRLKAIQNKIASWIKEIESGFIDALFSKIGPSKMLRSKLMLALLDEKTDAILLDKALNLCAIVEMIQTASLLHDDVIDKATMRRKLPSINALFGNFNAVMLGDVFYSKAFFELSKMGESIAQALSNAVLRLSRGEIEDVFVGECFNSDKQKYWRILEDKTAHFIEASLKSMAILLNKDAKMYADFGLHFGMAFQIIDDLLDITQDANTLGKPNFSDFKEGKTTLPYLLLYEKLNQHEQGF

SEQ ID NO: 8028 - protein, 307 aa, Helicobacter pylori
  misc_feature (B) LOCATION 1...307
  hypothetical: YES
MQEKRLKAIQNKIASWIKEIESGFIDALFSKIGPSKMLRSKLMLALLDEKTDAILLDKALNLCAIVEMIQTASLLHDDVIDKATMRRKLPSINALFGNFNAVMLGDVFYSKAFFELSKMGESIAQALSNAVLRLSRGEIEDVFVGECFNSDKQKYWRILEDKTAHFIEASLKSMAILLNKDAKMYADFGLHFGMAFQIIDDLLDITQDANTLGKPNFSDFKEGKTTLPYLLLYEKLNQHEQGLLISYFKQDSHEIIEWTKEKFKQHGIIEETLKIAQVYSKKALEAIKGENNLILEKLAQDVIYRTF

SEQ ID NO: 8029 - protein, 75 aa, Helicobacter pylori
  misc_feature (B) LOCATION 1...75
  hypothetical: YES
HHATPLEVLERCEVFLCEDTRVSKRLLHLLAKNPIISHSFPNIAAKKREFIAFHSHNDQEFLNQIEPSFFDKESL

SEQ ID NO: 8030 - protein, 135 aa, Helicobacter pylori
  misc_feature (B) LOCATION 1...135
  hypothetical: YES
LRIIKILNALAYLEEKTPVVFYESPHRLLETLRDLNDLAQGMHLFAAKELTKLHQQYYLGEISQIMTQLQKSNIQGEWVLVLLNEKKIEPSMGLSALLELDLPPKIKAKMEAAMTQKNAKELYFQRLLEEKKQCD

SEQ ID NO: 8031 - protein, 162 aa, Helicobacter pylori
  misc_feature (B) LOCATION 1...162
  hypothetical: YES
TAFCASGFLEGRFFYAGFLPHKSKERRLRIIKILNALAYLEEKTPVVFYETPHRLLETLRDLNDLAQGMHLFAAKELTKLHQQYYLGEISQIMTQLQKSNIQGEWVLVLLNEKKIEPSMGLSALLELDLPPKIKAKMEAAMTQKNAKELYFQRLLEEKKQCD

SEQ ID NO: 8032 - protein, 161 aa, Helicobacter pylori
  misc_feature (B) LOCATION 1...161
  hypothetical: YES
AFCASGFLEGRFFYAGFLPHKSKERRLRIIKILNALAYLEEKTPVVFYETPHRLLETLRDLNDLAQGMHLFAAKELTKLHQQYYLGEISQIMTQLQKSNIQGEWVLVLLNEKKIEPSMGLSALLELDLPPKIKAKMEAAMTQKNAKELYFQRLLEEKKQCD

SEQ ID NO: 8033 - protein, 260 aa, Helicobacter pylori
  misc_feature (B) LOCATION 1...260
  hypothetical: YES
LCEDTRVSKRLLHLLAKNPIISHSFPNIAAKKREFIAFHSHNDQEFLNQIEPSFFDKEIAVMSDAGMPSLSDPGMSLVAYALKHNLQYDVLPGANALTTAFCASGFLEGRFFYAGFLPHKSKERRLRIIKILNALAYLEEKTPVVFYESPHRLLETLRDLNDLAQGMHLFAAKELTKLHQQYYLGEISQIMTQLQKSNIQGEWVLVLLNEKKIEPSMGLSALLELDLPPKIKAKMEAAMTQKNAKELYFQRLLEEKKQCD

SEQ ID NO: 8034 - protein, 227 aa, Helicobacter pylori
  misc_feature (B) LOCATION 1...227
  hypothetical: YES
MQAVIYGKQVITHLLNSHHEKLQEIYLSKEIDKKLFFALKKACPNIIKVDNKKAQSLAKGGNHQGVLAKVELPLAASLKEIKKAQKLLVLCGITDVRNIGGIFRSAYCLGMDGVILDFAREFAYEGIVRSSLGLMYDLPFSVMPNTLDLINELKTSGFLCLGASMQGSSQAENLSLKKCALFLGSEHEGLSKKILAKMDAILSVKMRRDFDSLNVSVAAGILMDKIN

SEQ ID NO: 8035 - protein, 239 aa, Helicobacter pylori
  misc_feature (B) LOCATION 1...239
  hypothetical: YES
KKKNNAIRKGFSMQAVIYGKQVITHLLNSHHEKLQEIYLSKEIDKKLFFALKKACPNIIKVDNKKAQSLAKGGNHQGVLAKVELPLAASLKEIKKAQKLLVLCGITDVRNIGGIFRSAYCLGMDGVILDFAREFAYEGIVRSSLGLMYDLPFSVMPNTLDLINELKTSGFLCLGASMQGSSQAENLSLKKCALFLGSEHEGLSKKILAKMDAILSVKMRRDFDSLNVSVAAGILMDKIN

SEQ ID NO: 8036 - protein, 146 aa, Helicobacter pylori
  misc_feature (B) LOCATION 1...146
  hypothetical: YES
LILAAKNSVFAHIRRGDYVGIGCQLGIDYQKKAVEYMAKRVPNMELFVFCEDLKFTQNLDLGYPFMDMTTRDKDEEAYWDMLLMQSCKHGIIANSTYSWWAAYLINNPGKIIIGPKHWLFGHENILCKEWVKIESHFEVKSQKYNA

SEQ ID NO: 8037 - protein, 174 aa, Helicobacter pylori
  misc_feature (B) LOCATION 1...174
  hypothetical: YES
SSKPSPYPPPPENGNNKKKEEEYHRKLSLILAAKNSVFAHIRRGDYVGIGCQLGIDYQKKAVEYMAKRVPNMELFVFCEDLKFTQNLDLGYPFMDMTTRDKDEEAYWDMLLMQSCKHGIIANSTYSWWAAYLINNPGKIIIGPKHWLFGHENILCKEWVKIESHFEVKSQKYNA

SEQ ID NO: 8038 - protein, 202 aa, Helicobacter pylori
  misc_feature (B) LOCATION 1...202
  hypothetical: YES
VMSEKDEGIYDAMNKGIKRSSGDIIALLNSDDFYKDEFVVEKVVHEFENKNCDSVYGDLGVVKPDCLEKVVRYYESGEFSPKTLLYGVVPAHPTLFVKKAIYERYGLYKTDYKISADFEMIIRLFVVQKISFSYLKEVLVIMRTGGVSASGFKSLLLRNKENLRACQENGIQANVFSMLLKYPRKIMGLFKRESKGSLKRND

SEQ ID NO: 8039 - protein, 219 aa, Helicobacter pylori
  misc_feature (B) LOCATION 1...219
  hypothetical: YES
RDSTLEIIQKYKDRIACVMSEKDEGIYDAMNKGIKRSSGDIIALLNSDDFYKDEFVVEKVVHEFENKNCDSVYGDLGVVKPDCLEKVVRYYESGEFSPKTLLYGVVPAHPTLFVKKAIYERYGLYKTDYKISADFEMIIRLFVVQKISFSYLKEVLVIMRTGGVSASGFKSLLLRNKENLRACQENGIQANVFSMLLKYPRKIMGLFKRESKGSLKRND

SEQ ID NO: 8040 - protein, 140 aa, Helicobacter pylori
  misc_feature (B) LOCATION 1...140
  hypothetical: YES
MAFKVVQICGGLGNQMFQYAFAKSLQKHSNTPVLLDITSFDGSNRKMQLELFPIDLPYASAKEIAIAKMQHLPKLVRDALKYMGFDRVSQEIVFEYEPKLLKPSRLTYFYGYFQDPRYFDAISSLIKQTFTLPPPPRKWK

SEQ ID NO: 8041 - protein, 140 aa, Helicobacter pylori; identical to SEQ ID NO: 8040
  misc_feature (B) LOCATION 1...140
  hypothetical: YES

SEQ ID NO: 8042 - protein, 40 aa, Helicobacter pylori
  misc_feature (B) LOCATION 1...40
  hypothetical: YES
VITACFNREKTIEDTILSVLNQTYKNIEYIIIDGASAIAL

SEQ ID NO: 8043 - protein, 45 aa, Helicobacter pylori
  misc_feature (B) LOCATION 1...45
  hypothetical: YES
LLKVSVITACFNSEKTIEDTILSVLNQTYKNIEYIIIDGASAIAL

SEQ ID NO: 8044 - protein, 61 aa, Helicobacter pylori
  misc_feature (B) LOCATION 1...61
  hypothetical: YES
ICLKLNQGGVYQKRVGLLKVSVITACFNSEKTIEDTILSVLNQTYKNIEYIIIDGASAIAL

SEQ ID NO: 8045 - protein, 176 aa, Helicobacter pylori
  misc_feature (B) LOCATION 1...176
  hypothetical: YES
MPKPKKNTLPCSLSVKMSYFMRLLIKWRTRSLSHKMMTLVQILSILALASKASEDLEEQLKKIKDYIYKTLNAKIASDVYDRVLILVNEYCANEELFDKESVKISDLLIQDIQLYALVDEMLKEDKYQVQHTILKGIIKRKYDEAYSLNSEDRILLEYQERLLEPSYASFSNKKFK

SEQ ID NO: 8046 - protein, 180 aa, Helicobacter pylori
  misc_feature (B) LOCATION 1...180
  hypothetical: YES
KKISMPKPKKNTLPCSLSVKMSYFMRLLIKWRTRSLSHKMMTLVQILSILALASKASEDLEEQLKKIKDYIYKTLNAKIASDVYDRVLILVNEYCANEELFDKESVKISDLLIQDIQLYALVDEMLKEDKYQVQHTILKGIIKRKYDEAYSLNSEDRILLEYQERLLEPSYASFSNKKFK

SEQ ID NO: 8047 - protein, 160 aa, Helicobacter pylori
  misc_feature (B) LOCATION 1...160
  hypothetical: YES
KAVLMLIHICCSVDNLYFLKKAKEAFAGEKIVGFFYNPNIHPYSEYLLRLEDVKRTCEMLGIELLEGDYELEKFLDKAKGKELLGEKSERCFECFDLRLEASALKAFELGEEKFTTTLLTSPKKTLTSSSLRDNTSRKGTIWNLLCSETIILNILRASWI

SEQ ID NO: 8048 - protein, 249 aa, Helicobacter pylori
  misc_feature (B) LOCATION 1...249
  hypothetical: YES
KDPNQLIAKGQHIAQRHNLEFVVFRNDNFEHFKSELDLNLQALARENELYRQNYCGCQFALKIQKESQNRSPFELYSPLKRQILPASIEERTQVFRELDAAKKDANKPFLAQKTIATYRLLNGGVWLSKNSNPLDCCILARSKSKAKVRINDLRWVFSQRLSALVGYSQRDETLFLTLEGLNTLMAKNYDNLKELNLNPLSYEEELSLRALVSGSESINPIIVLEERTEKTLFVEIKSIFQEEKVFYLL

SEQ ID NO: 8049 - protein, 368 aa, Helicobacter pylori
  misc_feature (B) LOCATION 1...368
  hypothetical: YES
MLIHICCSVDNLYFLKKAKEAFAGEKIVGFFYNPNIHPYSEYLLRLEDVKRTCEMLGIELLEGDYELEKFLDKAKGKELLGEKSERCFECFDLRLEASALKAFELGEEKFTTTLLTSPKKDPNQLIAKGQHIAQRHNLEFVVFRNDNFEHFKSELDLNLQALARENELYRQNYCGCQFALKIQKESQNRSPFELYSPLKRQILPASIEERTQVFRELDAAKKDANKPFLAQKTIATYRLLNGGVWLSKNSNPLDCCILARSKSKAKVRINDLRWVFSQRLSALVGYSQRDETLFLTLEGLNTLMAKNYDNLKELNLNPLSYEEELSLRALVSGSESINPIIVLEERTEKTLFVEIKSIFQEEKVFYLL

SEQ ID NO: 8050 - protein, 82 aa, Helicobacter pylori
  misc_feature (B) LOCATION 1...82
  hypothetical: YES
MKTFKKGVILDAKSVGLKALEVLKEVADFDFYEVTSPNQIVERSIEAEIMVLNKVVITQEVLANCLNSNSFASPLQARIMWI

SEQ ID NO: 8051 - protein, 94 aa, Helicobacter pylori
  misc_feature (B) LOCATION 1...94
  hypothetical: YES
LYNFKIKSGSIEMKTFKKGVILDAKSVGLKALEVLKEVADFDFYEVTSPNQIVERSIEAEIMVLNKVVITQEVLANCLNSNSFASPLQARIMWI

SEQ ID NO: 8052 - protein, 206 aa, Helicobacter pylori
  misc_feature (B) LOCATION 1...206
  hypothetical: YES
SRYHPRGFSQLPKLKLICITATGTDNVDIKSAKALGIEVKNVSAYSTESVAQHTLACALSLLGRINDYDRYCKSGEYSQSDIFTHISDIKMGLIKGGQWGVIGLGNIGKRVAKLAQAFGAKVVYFSPKDKKEEYERLSLEELLKTSGIISIHAPLNESTRDLIALKELQSLKDGAILINVGRGGIVNEKDLALILETKDLYYASDV

SEQ ID NO: 8053 - protein, 207 aa, Helicobacter pylori
  misc_feature (B) LOCATION 1...207
  hypothetical: YES
SRYHPRGFSQLPKLKLICITATGTDNVDIKSAKALGIEVKNVSAYSTESVAQHTLACALSLLGRINDYDRYCKSGEYSQSDIFTHISDIKMGLIKGGQWGVIGLGNIGKRVAKLAQAFGAKVVYFSPKDKKEEYERLSLEELLKTSGIISIHAPLNESTRDLIALKELQSLKDGAILINVGRGGIVNEKDLALILETKDLYYASDVF

SEQ ID NO: 8054 - protein, 250 aa, Helicobacter pylori
  misc_feature (B) LOCATION 1...250
  hypothetical: YES
LPKLKLICITATGTDNVDIKSAKALGIEVKNVSAYSTESVAQHTLACALSLLGRINDYDRYCKSGEYSQSDIFTHISDIKMGLIKGGQWGVIGLGNIGKRVAKLAQAFGAKVVYFSPKDKKEEYERLSLEELLKTSGIISIHAPLNESTRDLIALKELQSLKDGAILINVGRGGIVNEKDLALILETKDLYYASDVFVKEPFEKDHAFLNPKIQNKLLLTPHIAWAYSDSLKTLVEKTKENIQDFLASQK

SEQ ID NO: 8055 - protein, 314 aa, Helicobacter pylori
  misc_feature (B) LOCATION 1...314
  hypothetical: YES
MKTFKKGVILDAKSVGLKALEVLKEVADFDFYEVTSPNQIVERSIEAEIMVLNKVVITQEVLSQLPKLKLICITATGTDNVDIKSAKALGIEVKNVSAYSTESVAQHTLACALSLLGRINDYDRYCKSGEYSQSDIFTHISDIKMGLIKGGQWGVIGLGNIGKRVAKLAQAFGAKVVYFSPKDKKEEYERLSLEELLKTSGIISIHAPLNESTRDLIALKELQSLKDGAILINVGRGGIVNEKDLALILETKDLYYASDVFVKEPFEKDHAFLNPKIQNKLLLTPHIAWAYSDSLKTLVEKTKENIQDFLASQK

SEQ ID NO: 8056 - protein, 118 aa, Helicobacter pylori
  misc_feature (B) LOCATION 1...118
  hypothetical: YES
LYLVSNANNYIFDYLLLRGRNFKSLRSHAKFLKIPLLEPNKLKNIKLSFYNDEPWIEFGKKEQARAKAHYQAMLEKEKAKELAKQQANTLHSNELDDDPKAHAGLKQNGNTNSKGRNR

SEQ ID NO: 8057 - protein, 121 aa, Helicobacter pylori
  misc_feature (B) LOCATION 1...121
  hypothetical: YES
IQFLYLVSNANNYIFDYLLLRGRNFKSLRSHAKFLKIPLLEPNKLKNIKLSFYNDEPWIEFGKKEQARAKAHYQAMLEKEKAKELAKQQANTLHSNELDDDPKAHAGLKQNGNTNSKGRNR

SEQ ID NO: 8058 - protein, 70 aa, Helicobacter pylori
  misc_feature (B) LOCATION 1...70
  hypothetical: YES
MILTAMQDAIGRTPIFKFTRKDYPIPLKSAIYAKLEHLNPGGSVKDRLGQYLIKEAFRTRKITSTTTISD

SEQ ID NO: 8059 - protein, 87 aa, Helicobacter pylori
  misc_feature (B) LOCATION 1...87
  hypothetical: YES
VIVIFIMEEIMILTAMQDAIGRTPIFKFTRKDYPIPLKSAIYAKLEHLNPGGSVKDRLGQYLIKKRLERAKSLPQRPSVTLQQAIPA

SEQ ID NO: 8060 - protein, 186 aa, Helicobacter pylori
  misc_feature (B) LOCATION 1...186
  hypothetical: YES
MILTAMQDAIGRTPIFKFTRKDYPIPLKSAIYAKLEHLNPGGSVKDRLGQYLIKEAFRTRKITSTTTIIEPTAGNTGIALALVAIKHHLKTIFVVPKKFSTEKQQIMRALGALVINTPTSEGISGAIKKSKELAESIPDSYLPLQFENPDNPAAYYHTLAPEIVQELGTNLTSFVAGIGSGGTFAG

SEQ ID NO: 8061 - protein, 98 aa, Helicobacter pylori
  misc_feature (B) LOCATION 1...98
  hypothetical: YES
MTINTHYTPNFTQLQTLNNINNDATIKDRNQAEQDLQQSSIQDGFSQDNTQNAPDFDRLQALNAINNDGEIKDKSQVEKSLVDGENTPEIYSSLDTYA

SEQ ID NO: 8062 - protein, 99 aa, Helicobacter pylori
  misc_feature (B) LOCATION 1...99
  hypothetical: YES
NMTINTHYTPNFTQLQTLNNINNDATIKDRNQAEQDLQQSSIQDGFSQDNTQNAPDFDRLQALNAINNDGEIKDKSQVEKSLVDGENTPEIYSSLDTYA

SEQ ID NO: 8063 - protein, 78 aa, Helicobacter pylori
  misc_feature (B) LOCATION 1...78
  hypothetical: YES
YLLLKKLVIMLNMNTHTRGIDSGLIHSLQSISLSMFRKGFFGLYQGSISARIGANQFVINKRNAVFDQLNENTLLVLT

SEQ ID NO: 8064 - protein, 144 aa, Helicobacter pylori
  misc_feature (B) LOCATION 1...144
  hypothetical: YES
HDKIDYRWKEASLDSPIHASVYREFLDAKFIAYARPPYSLAYSLRHNRLLPRDYLGYRSLGEEIAIFNPKDYDSWQERADTEILRQLQESKKYFVFIKGCGIFAYHRELSKLMEVFDLIENSCKVLRLGDLMDYCYNDDPRLSV

SEQ ID NO: 8065 - protein, 212 aa, Helicobacter pylori
  misc_feature (B) LOCATION 1...212
  hypothetical: YES
MLNMNTHTRGIDSGLIHSLQSISLSMFRKGFFGLYQGSISARIGANQFVINKRNAVFDQLNENTLLVLHDKIDYRWKEASLDSPIHASVYREFLDAKFIAYARPPYSLAYSLRHNRLLPRDYLGYRSLGEEIAIFNPKDYDSWQERADTEILRQLQESKKYFVFIKGCGIFAYHRELSKLMEVFDLIENSCKVLRLGDLMDYCYNDDPRLSV

SEQ ID NO: 8066 - protein, 192 aa, Helicobacter pylori
  misc_feature (B) LOCATION 1...192
  hypothetical: YES
KGDFMKEQEWDLSALFENKESAEEFLKTLQTEVQEFENAYQNNLKNLDAAKFANTLKHYENLSEKISRAMAYAQLLFAKNTKEAKFYSQCEMACANIQQHLLFFEIEFKNLDAKKQLAFIKKCKDHAFYLNNLIEKKKHTLNLDEEKIALALSPVGVGAFSFVMDEHLFSLNISLHRINFKRRINFSPLAQP

SEQ ID NO: 8067 - protein, 398 aa, Helicobacter pylori
  misc_feature (B) LOCATION 1...398
  hypothetical: YES
ILALLHNPKRKIRKKSQKAFSKSLEKSRPLLTYILNMVRKDLLIETKLRKYDKKESFRHIDNQISQESVDSMIEIVNANFSLVHRYYHQKAQILGHKLKDYDRYAPLNDESITMTYSQALEEVLKTLKAFSPEFHKIASKAIKEGWVDSHPKDFKQGGAFSHGAVPSAHPYVLLNYTGNRRDAFTIAHEFGHMIHQELSKKQGVLNMDTPLTTAETASVFSEMLFFEHLKKGLKSDELLFMLAGKLEDIFSTLFRQVVMTNFERRIHEMDEELDTKDFDQIWFEENQRMFEKSVKLTKNYHLWWSYIPHFIHSPFYCYAYSYGQLLTLALYGLYKKSDAKEFVKTYTEFLSLGGSKSPKELVSMFGFDIDSKEFWEIGMQEVRHLLEEFERLLACKEN

SEQ ID NO: 8068 - protein, 578 aa, Helicobacter pylori
  misc_feature (B) LOCATION 1...578
  hypothetical: YES
MKEQEWDLSALFENKESAEEFLKTLQTEVQEFENAYQNNLKNLDAAKFANTLKHYENLSEKISRAMAYAQLLFAKNTKEAKFYSQCEMACANIQQHLLFFEIEFKNLDAKKQLAFIKKCKDHAFYLNNLIEKKKHTLNLDEEKIALALSPVGVGAFSRLFDEHFSSLKIPFEEKTLSEEEILALLHNPKRKIRKKSQKAFSKSLEKSRPLLTYILNMVRKDLLIETKLRKYDKKESFRHIDNQISQESVDSMIEIVNANFSLVHRYYHQKAQILGHKLKDYDRYAPLNDESITMTYSQALEEVLKTLKAFSPEFHKIASKAIKEGWVDSHPKDFKQGGAFSHGAVPSAHPYVLLNYTGNRRDAFTIAHEFGHMIHQELSKKQGVLNMDTPLTTAETASVFSEMLFFEHLKKGLKSDELLFMLAGKLEDIFSTLFRQVVMTNFERRIHEMDEELDTKDFDQIWFEENQRMFEKSVKLTKNYHLWWSYIPHFIHSPFYCYAYSYGQLLTLALYGLYKKSDAKEFVKTYTEFLSLGGSKSPKELVSMFGFDIDSKEFWEIGMQEVRHLLEEFERLLACKEN

SEQ ID NO: 8069 - protein, 145 aa, Helicobacter pylori
  misc_feature (B) LOCATION 1...145
  hypothetical: YES
LSEWQTFCLKDLGKIVGGATPPTNNPKNYGNKIAWITPKDLSTLQGRYIKKGSRSISRLGFKSCSCVLLPKHAILFSSRAPIGYVAIAEKRLCTNQGFKSIIPNKKIYFEFLYYLLKYYKDNISNIGGGTTFKEVSGATLGSIPS

SEQ ID NO: 8070 - protein, 409 aa, Helicobacter pylori
  misc_feature (B) LOCATION 1...409
  hypothetical: YES
LSEWQTFCLKDLGKIVGGATPPTNNPKNYGNKIAWITPKDLSTLQGRYIKKGSRSISRLGFKSCSCVLLPKHAILFSSRAPIGYVAIAEKRLCTNQGFKSIIPNKKIYFEFLYYLLKYYKDNISNIGGGTTFKEVSGATLGLFQVKIPPTYYEQQKIAHTLSILDQKIENNHKINELLHKILELLYEQYFVRFDFLDENNKPYQTSGGKMKFSKELNRLIPNDFKVKTLGELITWISGSQPPKSCHIYEYKEGYIRFIQNRDYSSNNYVTYIPISKNNKICYQYDIMMDKYGEAGSVRFGLQGAYNVALSKISVLNQSMQEYIRSYLNSKPIKKYLSNACMASTRASLNENHIYSLMLPIPPINLLQKYEKIAKNIITAIIKNNQSTQTLTALRDFLLPLLLKQQVKPQ

SEQ ID NO: 8071 - protein, 413 aa, Helicobacter pylori
  misc_feature (B) LOCATION 1...413
  hypothetical: YES
KGLGLSEWQTFCLKDLGKIVGGATPPTNNPKNYGNKIAWITPKDLSTLQGRYIKKGSRSISRLGFKSCSCVLLPKHAILFSSRAPIGYVAIAEKRLCTNQGFKSIIPNKKIYFEFLYYLLKYYKDNISNIGGGTTFKEVSGATLGLFQVKIPPTYYEQQKIAHTLSILDQKIENNHKINELLHKILELLYEQYFVRFDFLDENNKPYQTSGGKMKFSKELNRLIPNDFKVKTLGELITWISGSQPPKSCHIYEYKEGYIRFIQNRDYSSNNYVTYIPISKNNKICYQYDIMMDKYGEAGSVRFGLQGAYNVALSKISVLNQSMQEYIRSYLNSKPIKKYLSNACMASTRASLNENHIYSLMLPIPPINLLQKYEKIAKNIITAIIKNNQSTQTLTALRDFLLPLLLKQQVKPQ

SEQ ID NO: 8072 - protein, 106 aa, Helicobacter pylori
  misc_feature (B) LOCATION 1...106
  hypothetical: YES
MEIILLIVAAVVLFYFYNTLKEYLKNPLNPKTKTEEYDLKNDPYLLVQSSPLDKFKQTQIGAYMRLLKFLDIQKNALDNALRTLFIHELEQPLNSEQQNLGQRASQ

SEQ ID NO: 8073 - protein, 109 aa, Helicobacter pylori
  misc_feature (B) LOCATION 1...109
  hypothetical: YES
RKKMEIILLIVAAVVLFYFYNTLKEYLKNPLNPKTKTEEYDLKNDPYLLVQSSPLDKFKQTQIGAYMRLLKFLDIQKNALDNALRTLFIHELEQPLNSEQQNLGQRASQ

SEQ ID NO: 8074 - protein, 147 aa, Helicobacter pylori
  misc_feature (B) LOCATION 1...147
  hypothetical: YES
VDKKENFESLCQEIADHTHGEYTKRLKLVEFLMLLAYADGILDSKEKELFLDVGAFLQIDNQDFNELYDNFEHFNSIEIPMSLEEAKNLFEIQTHTTMQDLEKKALDLSAPYYHKMNDNKRYSEQDFISLKKIALASQLLENDLKDS

SEQ ID NO: 8075 - protein, 155 aa, Helicobacter pylori
  misc_feature (B) LOCATION 1...155
  hypothetical: YES
AKELLNEPVDKKENFESLCQEIADHTHGEYTKRLKLVEFLMLLAYADGILDSKEKELFLDVGAFLQIDNQDFNELYDNFEHFNSIEIPMSLEEAKNLFEIQTHTTMQDLEKKALDLSAPYYHKMNDNKRYSEQDFISLKKIALASQLLENDLKDS

SEQ ID NO: 8076 - protein, 255 aa, Helicobacter pylori
  misc_feature (B) LOCATION 1...255
  hypothetical: YES
MEIILLIVAAVVLFYFYNTLKEYLKNPLNPKTKTEEYDLKNDPYLLVQSSPLDKFKQTQIGAYMRLLKFLDIQKNALDNALRTLFIHELEQPLNSEQQNLAKELLNEPVDKKENFESLCQEIADHTHGEYTKRLKLVEFLMLLAYADGILDSKEKELFLDVGAFLQIDNQDFNELYDNFEHFNSIEIPMSLEEAKNLFEIQTHTTMQDLEKKALDLSAPYYHKMNDNKRYSEQDFISLKKIALASQLLENDLKDS

SEQ ID NO: 8077 - protein, 255 aa, Helicobacter pylori; identical to SEQ ID NO: 8076
  misc_feature (B) LOCATION 1...255
  hypothetical: YES

SEQ ID NO: 8078 - protein, 102 aa, Helicobacter pylori
  misc_feature (B) LOCATION 1...102
  hypothetical: YES
FKGFLLNRFFNRELSWLAFNTRVLNEAKDESLPLLERLKFLAIYDTNLDEFYMIRVAGLKQLYEHKIASKGIDGASPEEQLEKIKHYLAHEIEERELEFQKI

SEQ ID NO: 8079 - protein, 113 aa, Helicobacter pylori
  misc_feature (B) LOCATION 1...113
  hypothetical: YES
SNLHWAKALEGAGALVVYGVFKLKVHAKMLVITKKTDNQLRHFTHLSTGNYNPLSAKIYTDVSFFSAKNEIANDIIKLFHSLLTSSATSNTLETLSWRPNRSSLKSLNSFKMK

SEQ ID NO: 8080 - protein, 112 aa, Helicobacter pylori
  misc_feature (B) LOCATION 1...112
  hypothetical: YES
NLHWAKALEGAGALVVYGVFKLKVHAKMLVITKKTDNQLRHFTHLSTGNYNPLSAKIYTDVSFFSAKNEIANDIIKLFHSLLTSSATSNTLETLSWRPNRSSLKSLNSFKMK

SEQ ID NO: 8081 - protein, 119 aa, Helicobacter pylori
  misc_feature (B) LOCATION 1...119
  hypothetical: YES
KGLCITPYNELNLSKKRRLKPLLKEQLYALVLPFKLNSSHTFPPLANLTFALFAHIKDKETQSASYALIKLPSFIFRFVELEKGLFALAEEIVEAHLEELLLEHEDFRLHGFYGNLRCG

SEQ ID NO: 8082 - protein, 139 aa, Helicobacter pylori
  misc_feature (B) LOCATION 1...139
  hypothetical: YES
KRNQGEIVRLQTQKGSQELLKTLLASLRSFQTHSYKKHKLTGMHIYKSAIMLNLGDLWELVNHSDFKALKSPNFTPKIHPHFNENDLFKFIEKQDLVLFHPYESFEPVIDLIEQAASDPTTLSIKMTLYRVGKHPPLSK

SEQ ID NO: 8083 - protein, 230 aa, Helicobacter pylori
  misc_feature (B) LOCATION 1...230
  hypothetical: YES
LNRFFNRELSWLAFNTRVLNEAKDESLPLLERLKFLAIYDTNLDEFYMIRVAGLKQLYEHKIASKGIDGASPEEQLEKIKHYLAHEIEERELEFQKIQALLFKKGLCITPYNELNLEQKAKAKTYFKEQLYALVLPFKLNSSHTFPPLANLTFALFAHIKDKETQSASYALIKLPSFIFRFVELEKGLFALAEEIVEAHLEELFLEHEILDCMAFSGNLRCDIAITEDEA

SEQ ID NO: 8084 - protein, 668 aa, Helicobacter pylori
  misc_feature (B) LOCATION 1...668
  hypothetical: YES
MLSWLAFNTRVLNEAKDESLPLLERLKFLAIYDTNLDEFYMIRVAGLKQLYEHKIASKGIDGASPEEQLEKIKHYLAHEIEERELEFQKIQALLFKKGLCITPYNELNLEQKAKAKTYFKEQLYALVLPFKLDSSHTFPPLANLTFALFAHIKDKETQSASYALIKLPSFIFRFVELEKGLFALAEEIVEAHLEELFLEHEILDCMAFRVTCDADIAITEDEAHDYADLMSKSLRKRNQGEIVRLQTQKGSQELLKTLLASLRSFQTHSYKKHKLTGMHIYKSAIMLNLGDLWELVNHSDFKALKSPNFTPKIHPHFNENDLFKSIEKQDLLLFHPYESFEPVIDLIEQAASDPTTLSIKMTLYRVGKHSPIVKALIEAASKIQVSVLVELKARFDEESNLHWAKALERAGALVVYGVFKLKVHAKMLVITKKTDNQLRHFTHLSTGNYNPLSAKIYTDVSFFSAKNEIANDIIKLFHSLLTSSATSNTLETLFMAPKQIKPKIIELIQNEMNHKQEGYIILKANALVDSEIIEWLYQASQKGVKIDLIIRGICCLKPQVKGLSENIRVYSIVGKYLEHARIYYFKHENIYFSSADLMPRNLERRVELLIPATNPKIANKLLHILEIQLKDTLKRYELNSKGRYAKISNPNDPLNSQDYFEKQALKTL

SEQ ID NO: 8085 - protein, 675 aa, Helicobacter pylori
  misc_feature (B) LOCATION 1...675
  hypothetical: YES
LNRFFNRELSWLAFNTRVLNEAKDESLPLLERLKFLAIYDTNLDEFYMIRVAGLKQLYEHKIASKGIDGASPEEQLEKIKHYLAHEIEERELEFQKIQALLFKKGLCITPYNELNLEQKAKAKTYFKEQLYALVLPFKLDSSHTFPPLANLTFALFAHIKDKETQSASYALIKLPSFIFRFVELEKGLFALAEEIVEAHLEELFLEHEILDCMAFRVTCDADIAITEDEAHDYADLMSKSLRKRNQGEIVRLQTQKGSQELLKTLLASLRSFQTHSYKKHKLTGMHIYKSAIMLNLGDLWELVNHSDFKALKSPNFTPKIHPHFNENDLFKSIEKQDLLLFHPYESFEPVIDLIEQAASDPTTLSIKMTLYRVGKHSPIVKALIEAASKIQVSVLVELKARFDEESNLHWAKALERAGALVVYGVFKLKVHAKMLVITKKTDNQLRHFTHLSTGNYNPLSAKIYTDVSFFSAKNEIANDIIKLFHSLLTSSATSNTLETLFMAPKQIKPKIIELIQNEMNHKQEGYIILKANALVDSEIIEWLYQASQKGVKIDLIIRGICCLKPQVKGLSENIRVYSIVGKYLEHARIYYFKHENIYFSSADLMPRNLERRVELLIPATNPKIANKLLHILEIQLKDTLKRYELNSKGRYAKISNPNDPLNSQDYFEKQALKTL

SEQ ID NO: 8086 - protein, 1027 aa, Helicobacter pylori
  misc_feature (B) LOCATION 1...1027
  hypothetical: YES
VCLDHQVGAGKTLCAIASCMEQKRMGLVNKTLIAVPNHLTKQWGDEFYKAYPNANVLVVDSKDTTEKERELLFNQIANNNYDAVVIAHTHLELLSNPRGIIEELKEEELVNAEKNFERQELAYKNNPRETKKPNERAFKNKLDKIRAKYDAILEKQGSHIDISQMGIDNLIVDEAHLFKNLAFETSMEKIAGLGNQQGSNRARDLFIKTRYLHQNDKKIMFLTGTPIANSLSEMYHLQRYLTPDVLKERGLEFFDDWAKTYGEVVNDFELDTSAQSYKMVNRFSKFSDVQGLSTMYRAFADIVSNDDILKHNPHFVPKVYGDKPINVVVKRSEEVAQFIGVALENGKYNEGSIIDRMQKCEGKKSQKGQDNILSCTTDARKVALDYRLIDPNAKVEKEFSKSYAMAKNIYENYLETHATKGTQLGFIGLSTPKTHSQKVSLEALDNAHETENKNPLDKAQELLESLSSYDEKGNLIAPSKKELENELKEKEAKSVNLDEEIAKGCSFDVYSDVLRHLVQMGIPQNEIAFIHDAKTEEQKQDLFKKLNRGGVRVLLGSPAKMGVGTNVQERLVAMHELDCPWRPDELLQMEGRGIRQGNILHQNDPENFRMKIYRYATEKTYDSRMWQIIETKSKGIEQFRNAHKLGLNELEDFNMGSSNASEMKAEATGNPLIIEEVKLRAEIKSEESKYKAFNKEHYFNEESLKNNASKLDYLKQELKDLETLQRSVIIPTHTEIKLYDLKNEESKDYELIKVKEVEPLKENASMSEELTHKKLKEQNKQIAEQNKEKLDAIKKQFASNLNTLFVNEEEDYKLLEYKGFVVNAYKTKYQVEFSLSPKDNPNIAYSPSNMVYKNDTINMFSSYNFCAEIKFDGFLKRLDNAITKLPEKIKELENSIEITKKNIAKYTRLVEQKPSYPRLEYLQALKWDHKTLIDDLAKMSKDRNYKPAFNPKSKEVLKNLNAEKRASLENEREEQGVKGNTKSHDEIEPATEQVIEKEIEKGDEIANNVDYYENEQEVEITKSMGRR

SEQ ID NO: 8087 - protein, 2384 aa, Helicobacter pylori
  misc_feature (B) LOCATION 1...2384
  hypothetical: YES
MERSSDEDLSHQDPSLFIESREQGGTRGVYRSSDQQAVSEESHRERDRIHEHVSRGDGVSARADARANSNGASSPASRMENGARSEEKGDNPSDERGIPQTPQSPSHQQNSSRDLGLSLSREQPGQTGRLRLFDHGQMGSLFPTDHENQRKRSDNELDRRSDKANENGDKSPRQNGSANQESARSERYGIAQGSSNQSVLLPAQSRLHHAGLSAQNGLRDLEENRDQEGRLLSNLDNLESLLNAIRNNTIASEPDFRSRLLEAIQNNDPLKDSIVGAQLLKDPTTKIFYDKFQLKISPKKVLEILENRLKKSIETTNETLNAFNVLDSQAIDLNAISNSVGLNPTQESKITDNSVELNNAQEQTAQEQTTQEQTTQEQTTQEQTTQEQTTQEQTTQEQTTQEQDTQENAPTTIKQETPITPAIPLNPKIDFKPSEEVLIKGAKTRYKANIKAIELLKELQAKQEILKGDYYATLKEQEILAQFSGWGGLESYFKKAQHPEEFKELNALLTKDEFRRAYLSARDAYYTPKLVIDSIYQGLDQLGFNNDNHPKEIFEPSLGTGKFIAHAPSDKNYRFIGTELDPISANLSKFLYPNQVIQNTALENYQFYQEYDAFVGNPPYGNHKIYSSNDKELSNESIHNYFLGKAIKELKDDGIGAFVVSSWFMDAKNPKMREHIAKNATFLGAIRLPNSVFKATGAEVTSDIVFFKKGVEKATNQSFTKAMPYYDKILNSLDDDTLFALQNNRFDSFIPSDQLKIVNAVANHFGFKQEKLQRWYEKIDTANFGYSTQDYKIIKDFIDKVGKNSINLNEQTLNEYFIHHPENILGHLSLEKTRYRFETNGEQIYKYDLQALEDESLDLSQALKQAIEKLPKDVYQYHKTTLKTDVLIIDSSNERYQEVQKLIKNLERRELVKWDNLYFQLEQNNEMGIFLKPTKINSKVQDSRLKAYFKIKDALNDLTSAELNPLSSDLELENKRAKLNLVYDEFVKKFGYLNENKNRKDIRQDLYGAKVLGLEKDFEKEITPRSAKMQNIEPRQAQAKKAQIFFERTLNPKKELIITNAKEALIASINQKGGLDLHFIRDHFTTQSLETTIKELLEQKLIYKDHKDNGGYILANDYLSGNVKRKLKEVKEAINQGVEGLEANVKDLELIIPKDLKATEIMANINSPWIPTQYLEEFLMELSANHYEKQYGDKMTDYQLSNLKEDIKIEHLSGAYEVFVRNNELNELYGIRHKDKPHSYKVPFESLLNKVLNNKDLSVKYAQVDPNDPKKEIFITDEEQSNLARQKAEELKEAFKDWIYKDYSRRTHLEQIYNDTFNNSVLKTYDGSQLELEGFNYHISLRPHQKNAIFRTIQDRAVCLDHQVGAGKTLCAIASCMEQKRMGLVNKTLIAVPNHLTKQWGDEFYKAYPNANVLVVDSKDTTEKERELLFNQIANNNYDAVVIAHTHLELLSNPRGIIEELKEEELVNAEKNFERQELAYKNNPRETKKPNERAFKNKLDKIRAKYDAILEKQGSHIDISQMGIDNLIVDEAHLFKNLAFETSMEKIAGLGNQQGSNRARDLFIKTRYLHQNDKKIMFLTGTPIANSLSEMYHLQRYLTPDVLKERGLEFFDDWAKTYGEVVNDFELDTSAQSYKMVNRFSKFSDVQGLSTMYRAFADIVSNDDILKHNPHFVPKVYGDKPINVVVKRSEEVAQFIGVALENGKYNEGSIIDRMQKCEGKKSQKGQDNILSCTTDARKVALDYRLIDPNAKVEKEFSKSYAMAKNIYENYLETHATKGTQLGFIGLSTPKTHSQKVSLEALDNAHETENKNPLDKAQELLESLSSYDEKGNLIAPSKKELENELKEKEAKSVNLDEEIAKGCSFDVYSDVLRHLVQMGIPQNEIAFIHDAKTEEQKQDLFKKLNRGGVRVLLGSPAKMGVGTNVQERLVAMHELDCPWRPDELLQMEGRGIRQGNILHQNDPENFRMKIYRYATEKTYDSRMWQIIETKSKGIEQFRNAHKLGLNELEDFNMGSSNASEMKAEATGNPLIIEEVKLRAEIKSEESKYKAFNKEHYFNEESLKNNASKLDYLKQELKDLETLQRSVIIPTHTEIKLYDLKNEESKDYELIKVKEVEPLKENASMSEELTHKKLKEQNKQIAEQNKEKLDAIKKQFASNLNTLFVNEEEDYKLLEYKGFVVNAYKTKYQVEFSLSPKDNPNIAYSPSNMVYKNDTINMFSSYNFCAEIKFDGFLKRLDNAITKLPEKIKELENSIEITKKNIAKYTRLVEQKPSYPRLEYLQALKWDHKTLIDDLAKMSKDRNYKPAFNPKSKEVLKNLNAEKRASLENEREEQGVKGNTKSHDEIEPATEQVIEKEIEKGDEIANNVDYYENEQEVEITKSMGRR

SEQ ID NO: 8088 - protein, 2440 aa, Helicobacter pylori
  misc_feature (B) LOCATION 1...2440
  hypothetical: YES
YNHPNLSVADLELEQQNLGEQNGKERTNRADEPNGTRAGIPQEIHRRSEPRGQQEGMERSSDEDLSHQDPSLFIESREQGGTRGVYRSSDQQAVSEESHRERDRIHEHVSRGDGVSARADARANSNGASSPASRMENGARSEEKGDNPSDERGIPQTPQSPSHQQNSSRDLGLSLSREQPGQTGRLRLFDHGQMGSLFPTDHENQRKRSDNELDRRSDKANENGDKSPRQNGSANQESARSERYGIAQGSSNQSVLLPAQSRLHHAGLSAQNGLRDLEENRDQEGRLLSNLDNLESLLNAIRNNTIASEPDFRSRLLEAIQNNDPLKDSIVGAQLLKDPTTKIFYDKFQLKISPKKVLEILENRLKKSIETTNETLNAFNVLDSQAIDLNAISNSVGLNPTQESKITDNSVELNNAQEQTAQEQTTQEQTTQEQTTQEQTTQEQTTQEQTTQEQTTQEQDTQENAPTTIKQETPITPAIPLNPKIDFKPSEEVLIKGAKTRYKANIKAIELLKELQAKQEILKGDYYATLKEQEILAQFSGWGGLESYFKKAQHPEEFKELNALLTKDEFRRAYLSARDAYYTPKLVIDSIYQGLDQLGFNNDNHPKKIFEPSLGTGKFIAHAPSDKNYRFIGTELDPISANLSKFLYPNQVIQNTALENYQFYQEYDAFVGNPPYGNHKIYSSNDKELSNESIHNYFLGKAIKELKDDGIGAFVVSSWFMDAKNPKMREHIAKNATFLGAIRLPNSVFKATGAEVTSDIVFFKKGVEKATNQSFTKAMPYYDKILNSLDDDTLFALQNNRFDSFIPSDQLKIVNAVANHFGFKQEKLQRWYEKIDTANFGYSTQDYKIIKDFIDKVGKNSINLNEQTLNEYFIHHPENILGHLSLEKTRYRFETNGEQIYKYDLQALEDESLDLSQALKQAIEKLPKDVYQYHKTTLKTDVLIIDSSNERYQEVQKLIKNLERRELVKWDNLYFQLEQNNEMGIFLKPTKINSKVQDSRLKAYFKIKDALNDLTSAELNPLSSDLELENKRAKLNLVYDEFVKKFGYLNENKNRKDIRQDLYGAKVLGLEKDFEKEITPRSAKMQNIEPRQAQAKKAQIFFERTLNPKKELIITNAKEALIASINQKGGLDLHFIRDHFTTQSLETTIKELLEQKLIYKDHKDNGGYILANDYLSGNVKRKLKEVKEAINQGVEGLEANVKDLELIIPKDLKATEIMANINSPWIPTQYLEEFLMELSANHYEKQYGDKMTDYQLSNLKEDIKIEHLSGAYEVFVRNNELNELYGIRHKDKPHSYKVPFESLLNKVLNNKDLSVKYAQVDPNDPKKEIFITDEEQSNLARQKAEELKEAFKDWIYKDYSRRTHLEQIYNDTFNNFVLKTYDGSQLELEGFNYHISLRPHQKNAIFRTIQDRAVCLDHQVGAGKTLCAIASCMEQKRMGLVNKTLIAVPNHLTKQWGDEFYKAYPNANVLVVDSKDTTEKERELLFNQIANNNYDAVVIAHTHLELLSNPRGIIEELKEEELVNAEKNFERQELAYKNNPRETKKPNERAFKNKLDKIRAKYDAILEKQGSHIDISQMGIDNLIVDEAHLFKNLAFETSMEKIAGLGNQQGSNRARDLFIKTRYLHQNDKKIMFLTGTPIANSLSEMYHLQRYLTPDVLKERGLEFFDDWAKTYGEVVNDFELDTSAQSYKMVNRFSKFSDVQGLSTMYRAFADIVSNDDILKHNPHFVPKVYGDKPINVVVKRSEEVAQFIGVALENGKYNEGSIIDRMQKCEGKKSQKGQDNILSCTTDARKVALDYRLIDPNAKVEKEFSKSYAMAKNIYENYLETHATKGTQLGFIGLSTPKTHSQKVSLEALDNAHETENKNPLDKAQELLESLSSYDEKGNLIAPSKKELENELKEKEAKSVNLDEEIAKGCSFDVYSDVLRHLVQMGIPQNEIAFIHDAKTEEQKQDLFKKLNRGGVRVLLGSPAKMGVGTNVQERLVAMHELDCPWRPDELLQMEGRGIRQGNILHQNDPENFRMKIYRYATEKTYDSRMWQIIETKSKGIEQFRNAHKLGLNELEDFNMGSSNASEMKAEATGNPLIIEEVKLRAEIKSEESKYKAFNKEHYFNEESLKNNASKLDYLKQELKDLETLQRSVIIPTHTEIKLYDLKNEESKDYELIKVKEVEPLKENASMSEELTHKKLKEQNKQIAEQNKEKLDAIKKQFASNLNTLFVNEEEDYKLLEYKGFVVNAYKTKYQVEFSLSPKDNPNIAYSPSNMVYKNDTINMFSSYNFCAEIKFDGFLKRLDNAITKLPEKIKELENSIEITKKNIAKYTRLVEQKPSYPRLEYLQALKWDHKTLIDDLAKMSKDRNYKPAFNPKSKEVLKNLNAEKRASLENEREEQGVKGNTKSHDEIEPATEQVIEKEIEKGDEIANNVDYYENEQEVEITKSMGRR

SEQ ID NO: 8089 - protein, 338 aa, Helicobacter pylori
  misc_feature (B) LOCATION 1...338
  hypothetical: YES
MNNLNNLSDEQINGMIDYLQNILMEMGGLKQEPPQNSNYSHNLEETNAQRTQSTQENSESKEALLKAKSGQINYVKTRIIQGLKEKNSPFWDKPEIVANKERGHNALNGEPYCNLNDMILDMEKNRLGFQSNAWVSLEEAKMLGASKEERDTIFKATQNKEISPVRLMFIKNKEPVPLVDNNGELVIDKNTKKPKHKQFAVIENGQKVFKPAYRDIEPQAQFKFVYNIEMFPSINKEKIKPLNLDKLSNYAYKTRLFHQKDYLQERRDKTNIIYEDLHRDLSPDNRNEALLERMRSYTLLKNEKYNQLANETKQQTQTRSQSQSYYQKKNKASSGIER

SEQ ID NO: 8090 - protein, 360 aa, Helicobacter pylori
  misc_feature (B) LOCATION 1...360
  hypothetical: YES
KPNTKITSLKEILLNLTHKEKKMNNLNNLSDEQINGMIDYLQNILMEMGGLKQEPPQNSNYSHNLEETNAQRTQSTQENSESKEALLKAKSGQINYVKTRIIQGLKEKNSPFWDKPEIVANKERGHNALNGEPYCNLNDMILDMEKNRLGFQSNAWVSLEEAKMLGASKEERDTIFKATQNKEISPVRLMFIKNKEPVPLVDNNGELVIDKNTKKPKHKQFAVIENGQKVFKPAYRDIEPQAQFKFVYNIEMFPSINKEKIKPLNLDKLSNYAYKTRLFHQKDYLQERRDKTNIIYEDLHRDLSPDNRNEALLERMRSYTLLKNEKYNQLANETKQQTQTRSQSQSYYQKKNKASSGIER

SEQ ID NO: 8091 - protein, 95 aa, Helicobacter pylori
  misc_feature (B) LOCATION 1...95
  hypothetical: YES
GNPNDYRQKPVFLRFVVDFFRGIDELFALNLHHSGAVSLWGIPFFYTPACECDHGHYYIERLKTTDGLEKHQKGLNNTKKQIQANPIEEIKENKK

SEQ ID NO: 8092 - protein, 298 aa, Helicobacter pylori
  misc_feature (B) LOCATION 1...298
  hypothetical: YES
LAKTETDNFNKQDKHKLDYRKINYESKEIDDGKFIRIGDEVNHIFIEKAKINRGYLQNPKHKRTWWSLWLYKKPSDDALDIKVLDVFDDGKYTYFRYDRDQAFSKFPYTYKVVDGYDNPINSRVVGNYIIAEDISKKWTLRSGKEYVCVRRDKRKYQKSRDFMRLKRLLEQDEAMKAKRNNMHLIEDTTPQPKNAISVTELLAQIKNQTPSKECRALNEEEVKTLEEVKNIIKTPKPLQKDLKKNAKKHTIKTQYCVPIPYIERLKTTDGLEKHQKGLNNTKKQIQANPIEEIKENKK

SEQ ID NO: 8093 - protein, 298 aa, Helicobacter pylori; identical to SEQ ID NO: 8092
  misc_feature (B) LOCATION 1...298
  hypothetical: YES

SEQ ID NO: 8094 - protein, 267 aa, Helicobacter pylori
  misc_feature (B) LOCATION 1...267
  hypothetical: YES
MDSKKPHYRVSLSEQALNHEKLMRAIVKNLADTPMVLKGETALYLGYGLNRFSEDLDFDCHKKINLLGRVKSAIPNGIILNDIHIKKDTDSVGRYMVRYATKDNKEEQTLKLEISYRDAPKESEVNVIEGMRIAKIERIIDNKLCACFDGEHTRTKARDLFDLHFLAKHYEEHFNLDLASRLKDFSKDPDKLVSDYLVDVKLDALLNQIMDLEETALELGVMAQLIHKKLEKQSHSLNALQEQQGYSNNDNSLDNSNENTYTPKRRR

SEQ ID NO: 8095 - protein, 267 aa, Helicobacter pylori; identical to SEQ ID NO: 8094
  misc_feature (B) LOCATION 1...267
  hypothetical: YES

SEQ ID NO: 8096 - protein, 87 aa, Helicobacter pylori
  misc_feature (B) LOCATION 1...87
  hypothetical: YES
LQLKTQMPILDFNIKEIKAKSPSPYTESTFIAMMETYGIGRPSTYTSIFETLKNKNYITLEGKNRKITPTALGKSIVDFFLNDSQTQ

SEQ ID NO: 8097 - protein, 122 aa, Helicobacter pylori
  misc_feature (B) LOCATION 1...122
  hypothetical: YES
CSFSQLKSKGFKAIKDLEEEKKDEEEIESDLDFSSLQLKTQMPILDFNIKEIKAKSPSPYTESTFIAMMETYGIGRPSTYTSIFETLKNKNYITLEGKNRKITPTALGKSIVDFFLNDSQTQ

SEQ ID NO: 8098 - protein, 269 aa, Helicobacter pylori
  misc_feature (B) LOCATION 1...269
  hypothetical: YES
MEKREQIAQMSRMELEQEFRKKFTAEANLEDSKREWSDRVMKIFHTKTLVYLLSLESREEQEEFIDLATNRQFQKNPIESEIEYMNMYLEEMEYQQERMQERIAMEHQVQQAEWKMEQEAKKRGIIPAMREEYHRHRNPHLINKIAPEIWGFLSLENSQDRLDAYAFLIMDRWAHYFPQTMKTKEKGAIMSLIDAVIKQTKMETKALDRMEAQIKRAQGVSDMELLKEAQINQYYYLLKADYIMQDSAHKMDLETLKKTGIKREDFYQI

SEQ ID NO: 8099 - protein, 272 aa, Helicobacter pylori
  misc_feature (B) LOCATION 1...272
  hypothetical: YES
ENKMEKREQIAQMSRMELEQEFRKKFTAEANLEDSKREWSDRVMKIFHTKTLVYLLSLESREEQEEFIDLATNRQFQKNPIESEIEYMNMYLEEMEYQQERMQERIAMEHQVQQAEWKMEQEAKKRGIIPAMREEYHRHRNPHLINKIAPEIWGFLSLENSQDRLDAYAFLIMDRWAHYFPQTMKTKEKGAIMSLIDAVIKQTKMETKALDRMEAQIKRAQGVSDMELLKEAQINQYYYLLKADYIMQDSAHKMDLETLKKTGIKREDFYQI

SEQ ID NO: 8100 - protein, 195 aa, Helicobacter pylori
  misc_feature (B) LOCATION 1...195
  hypothetical: YES
MIDKARKNLKDLKNIFLYWYEMFGSNDKSKDMMKAFMKDLAFAKDKNEVIKAQDNELVKEFMQELSSLSFKEQLEFYQTNRDYDPSLDNDENSSELLDAFTSSLENLEKQKINPIREQKRESGWQNNEDNKENSELEKAFKKDLSFSQSNPIPLDKKETSKEEKEEELESKEKEPKETLGFAHSFSSSRFSLDFM

SEQ ID NO: 8101 - protein, 197 aa, Helicobacter pylori
  misc_feature (B) LOCATION 1...197
  hypothetical: YES
LIMIDKARKNLKDLKNIFLYWYEMFGSNDKSKDMMKAFMKDLAFAKDKNEVIKAQDNELVKEFMQELSSLSFKEQLEFYQTNRDYDPSLDNDENSSELLDAFTSSLENLEKQKINPIREQKRESGWQNNEDNKENSELEKAFKKDLSFSQSNPIPLDKKETSKEEKEEELESKEKEPKETLGFAHSFSSSRFSLDFM

SEQ ID NO: 8102 - protein, 107 aa, Helicobacter pylori
  misc_feature (B) LOCATION 1...107
  hypothetical: YES
VDDSFTKKLEEMLDMIIEDGKSAYLDLMQNIQKRLGTEISNLYRNNSNNNASVTKKEMIPPTEKQLNFVETIEKTLQIKASDMTKKDKFACMRFIEEHSKKMPKKDK

SEQ ID NO: 8103 - protein, 112 aa, Helicobacter pylori
  misc_feature (B) LOCATION 1...112
  hypothetical: YES
IAISKVDDSFTKKLEEMLDMIIEDGKSAYLDLMQNIQKRLGTEISNLYRNNSNNNASVTKKEMIPPTEKQLNFVETIEKTLQIKASDMTKKDKFACMRFIEEHSKKMPKKDK

SEQ ID NO: 8104 - protein, 677 aa, Helicobacter pylori
  misc_feature (B) LOCATION 1...677
  hypothetical: YES
MLDRAILDTKLDSRPMDLSFLDDILKHMQKPRFSDSDKVDKRLLIKFNQFNPNSKFIKSNLVGTKTASPVLIKNIGQMKRSHLENALNYALENSETAYNEMFLECDKQFILESWLNDFDLTKDYNETMHLVFSIKDKPDEETMQGLLHSTWESLKIRLPEYKFALVPHAHQDHAHIHCFINKTNQLTRRRLRFKGREDCKEFFNELRSEFAYRLNEHLLSEEYLYVNEPKLKELDNIKLQLQDLEKEEKALEQIKSPQDEWDLNKALQKEYLQELKDKNKAKALDIQNNHSTPLKQKISKFKIALFNHKDTSDDEKESLSIDRIDKRKPVSEHLKNMSKHELYELLGFYQKELDKKQNHSAFKNFAILNGLDRDFERETKGYSVLKKKEMLLNKLKHLDKRLLDKNSHLLLAQLRNEVKTKQNTQYNTLTNPILLAKALELSKDKRPTLKTFKNAYFSARKYQFMLESFKTKQNDPTYKLNDNTYELVSKQLQDYQNTMLLLAKERLLFLEQDLKQKEEEFERAKEHYVKSSKHYRETSLSPKEKQGFLKQIKQFSKISKDILYTCNEIIGANRFLTHYDNLNLEKVLEHAKDTKLEQKEIQAITKEPNNDEPWIEFGKKEQARAKAHYQAMLEKEKAKELAKQQANTLHSNELDDDPKAHAGLKQNGNTNSKGRNR

SEQ ID NO: 8105 - protein, 677 aa, Helicobacter pylori
  misc_feature (B) LOCATION 1...677
  hypothetical: YES
MLDRAILDTKLDSRPMDLSFLDDILKHMQKPRFSDSDKVDKRLLIKFNQFNPNSKFIKSNLVGTKTASPVLIKNIGQMKRSHLENALNYALENSETAYNEMFLECDKQFILESWLNDFDLTKDYNETMHLVFSIKDKPDEETMQGLLHSTWESLKIRLPEYKFALVPHAHQDHAHIHCFINKTNQLTRRRLRFKGREDCKEFFNELRSEFAYRLNEHLLSEEYLYVNEPKLKELDNIKLQLQDLEKEEKALEQIKSPQDEWDLNKALQKEYLQELKDKNKAKALDIQNNHSTPLKQKISKFKIALFNHKDTSDDEKESLSIDRIDKRKPVSEHLKNMSKHELYELLGFYQKELDKKQNHSAFKNFAILNGLDRDFERETKGYSVLKKKEMLLNKLKHLDKRLLDKNSHLLLAQLRNEVKTKQNTQYNTLTNPILLAKALELSKDKRPTLKTFKNAYFSARKYQFMLESFKTKQNDPTYKLNDNTYELVSKQLQDYQNTMLLLAKERLLFLEQDLKQKEEEFERAKEHYVKSLKHYRETSLSPKEKQGFLKQIKQFSKISKDILYTCNEIIGANRFLTHYDNLNLEKVLEHAKDTKLEQKEIQAITKEPNNDEPWIEFGKKEQARAKAHYQAMLEKEKAKELAKQQANTLHSNELDDDPKAHAGLKQNGNTNSKGRNR

SEQ ID NO: 8106 - protein, 680 aa, Helicobacter pylori
  misc_feature (B) LOCATION 1...680
  hypothetical: YES
RVCMLDRAILDTKLDSRPMDLSFLDDILKHMQKPRFSDSDKVDKRLLIKFNQFNPNSKFIKSNLVGTKTASPVLIKNIGQMKRSHLENALNYALENSETAYNEMFLECDKQFILESWLNDFDLTKDYNETMHLVFSIKDKPDEETMQGLLHSTWESLKIRLPEYKFALVPHAHQDHAHIHCFINKTNQLTRRRLRFKGREDCKEFFNELRSEFAYRLNEHLLSEEYLYVNEPKLKELDNIKLQLQDLEKEEKALEQIKSPQDEWDLNKALQKEYLQELKDKNKAKALDIQNNHSTPLKQKISKFKIALFNHKDTSDDEKESLSIDRIDKRKPVSEHLKNMSKHELYELLGFYQKELDKKQNHSAFKNFAILNGLDRDFERETKGYSVLKKKEMLLNKLKHLDKRLLDKNSHLLLAQLRNEVKTKQNTQYNTLTNPILLAKALELSKDKRPTLKTFKNAYFSARKYQFMLESFKTKQNDPTYKLNDNTYELVSKQLQDYQNTMLLLAKERLLFLEQDLKQKEEEFERAKEHYVKSLKHYRETSLSPKEKQGFLKQIKQFSKISKDILYTCNEIIGANRFLTHYDNLNLEKVLEHAKDTKLEQKEIQAITKEPNNDEPWIEFGKKEQARAKAHYQAMLEKEKAKELAKQQANTLHSNELDDDPKAHAGLKQNGNTNSKGRNR

SEQ ID NO: 8107 - protein, 234 aa, Helicobacter pylori
  misc_feature (B) LOCATION 1...234
  hypothetical: YES
MNYKELLEFNDYAMDLTIRMAHHSTAIENNPLSLAEIISILTTEYIPREMPQRAFFEVKNYQNMLFFLLENLNKRQSMDSFFIRELHGILMNFLLPNKGAFKTTDNTILGASFETTPHFQAPMAMKEWCDNLNYKMKTLQDKEEKLKAILEQHILFERIHPFSDGNGRVGRILIFYSALEQNLIPFVITKEQKEAYIKALDTRNTESLYQLAKVSQEFELTRIQGQMVLNKNKP

SEQ ID NO: 8108 - protein, 235 aa, Helicobacter pylori
  misc_feature (B) LOCATION 1...235
  hypothetical: YES
VMNYKELLEFNDYAMDLTIRMAHHSTAIENNPLSLAEIISILTTEYIPREMPQRAFFEVKNYQNMLFFLLENLNKRQSMDSFFIRELHGILMNFLLPNKGAFKTTDNTILGASFETTPHFQAPMAMKEWCDNLNYKMKTLQDKEEKLKAILEQHILFERIHPFSDGNGRVGRILIFYSALEQNLIPFVITKEQKEAYIKALDTRNTESLYQLAKVSQEFELTRIQGQMVLNKNKP

SEQ ID NO: 8109 - protein, 308 aa, Helicobacter pylori
  misc_feature (B) LOCATION 1...308
  hypothetical: YES
LQEIENLHQSVLLQEVLQAFTPLEEGILIDCTLGLGGHSKAILSQKPHLKLIGIDKDKFAQEIAKERLKEFEGRYNLLSGGFAKRFKEALEIHGERIKGVLVDLGVSSLQLDDDNRGFNFRSHALDMRMDLESELNAQKVINSYPVVALEKIFRDYGEIKEYKKIAHKIAERRAKKPFKDAKDLSEFLSSLSKNKKIHPATLVFQAVRIEVNSELEELKEFLQCARNLKEAILCVISFHSLEDALVKNAFKDYAKNCICDPSSFKCACSNNHALGAILTKKPITPSPEEIKNNRRSRSAKMRVFQFKP

SEQ ID NO: 8110 - protein, 311 aa, Helicobacter pylori
  misc_feature (B) LOCATION 1...311
  hypothetical: YES
GDCLQEIENLHQSVLLQEVLQAFTPLEEGILIDCTLGLGGHSKAILSQKPHLKLIGIDKDKFAQEIAKERLKEFEGRYNLLSGGFAKRFKEALEIHGERIKGVLVDLGVSSLQLDDDNRGFNFRSHALDMRMDLESELNAQKVINSYPVVALEKIFRDYGEIKEYKKIAHKIAERRAKKPFKDAKDLSEFLSSLSKNKKIHPATLVFQAVRIEVNSELEELKEFLQCARNLKEAILCVISFHSLEDALVKNAFKDYAKNCICDPSSFKCACSNNHALGAILTKKPITPSPEEIKNNRRSRSAKMRVFQFKP

SEQ ID NO: 8111 - protein, 31 aa, Helicobacter pylori
  misc_feature (B) LOCATION 1...31
  hypothetical: YES
VEKYRHRRCYKQTQWCWRYHIHWSCNRLCGV

SEQ ID NO: 8112 - protein, 119 aa, Helicobacter pylori
  misc_feature (B) LOCATION 1...119
  hypothetical: YES
DTRLLHPTGVGTLIAQGKESREFNGKEYILERAITGDYGLIKAYKSDTLGNLVFRKTARNFNPLCAMAAKICVAEVEEIVPAGELDPDEIHLPGIYVQHIYKGEKFEKRIEKTTTRSAK

SEQ ID NO: 8113 - protein, 232 aa, Helicobacter pylori
  misc_feature (B) LOCATION 1...232
  hypothetical: YES
MNKVITDLDKALSGLKDGDTILVGGFGLCGIPEYAIDYIYKKGIKDLIVVSNNCGVDDFGLGILLEKKQIKKIIASYVGENKIFESQMLNGEIEVVLTPQGTLAENLRAGGAGIPAYYTPTGVGTLIAQGKESREFNGKEYILERAITGDYGLIKAYKSDTLGNLVFRKTARNFNPLCAMAAKICVAEVEEIVPAGELDPDEIHLPGIYVQHIYKGEKFEKRIEKTTTRSAK

SEQ ID NO: 8114 - protein, 133 aa, Helicobacter pylori
  misc_feature (B) LOCATION 1...133
  hypothetical: YES
MRANLDELDKVAAAILKDDFKGVVLLKGVVGSGKTTLVQACLKHLGLDIQATSPTFSLMHAYSESVFHYDFYMRDLETCLELGMLECLLEKGIHFVEWGDEKLEKILKKYDLAIKVVEIKTESTSRFYTIKIA

SEQ ID NO: 8115 - protein, 140 aa, Helicobacter pylori
  misc_feature (B) LOCATION 1...140
  hypothetical: YES
NQKRGIVMRANLDELDKVAAAILKDDFKGVVLLKGVVGSGKTTLVQACLKHLGLDIQATSPTFSLMHAYSESVFHYDFYMRDLETCLELGMLECLLEKGIHFVEWGDEKLEKILKKYDLAIKVVEIKTESTSRFYTIKIA

SEQ ID NO: 8116 - protein, 102 aa, Helicobacter pylori
  misc_feature (B) LOCATION 1...102
  hypothetical: YES
NGAFVNWMIPKKLIKGMGGAMDLVHGAKKVIVIMEHCNKYGESKVKKECSLPLTGKGVVHQLITDLAVFEFSNNAMELVELQEGVSLDQVKEKTEAEFEVHL

SEQ ID NO: 8117 - protein, 101 aa, Helicobacter pylori
  misc_feature (B) LOCATION 1...101
  hypothetical: YES
GAFVNWMIPKKLIKGMGGAMDLVHGAKKVIVIMEHCNKYGESKVKKECSLPLTGKGVVHQLITDLAVFEFSNNAMELVELQEGVSLDQVKEKTEAEFEVHL

SEQ ID NO: 8118 - protein, 207 aa, Helicobacter pylori
  misc_feature (B) LOCATION 1...207
  hypothetical: YES
MREAIIKRAAKELKEGMYVNLGIGLPTLVANEVSGMNIVFQSENGLLGIGAYPLEGGVDADLINAGKETITVVPGASFFNSADSFAMIRGGHIDLAILGGMEVSQNGDLANWMIPKKLIKGMGGAMDLVHGAKKVIVIMEHCNKYGESKVKKECSLPLTGKGVVHQLITDLAVFEFSNNAMELVELQEGVSLDQVKEKTEAEFEVHL

SEQ ID NO: 8119 - protein, 47 aa, Helicobacter pylori
  misc_feature (B) LOCATION 1...47
  hypothetical: YES
MEAIAIGHPICAGGARILVTLLHEMKRSGHDVGCASLCVGGGQGLSV

SEQ ID NO: 8120 - protein, 51 aa, Helicobacter pylori
  misc_feature (B) LOCATION 1...51
  hypothetical: YES
LKARAAINAGKFQEEITPIEIANKKGVVVFKEDEYPRGHDARIPCKAQTRL

SEQ ID NO: 8121 - protein, 54 aa, Helicobacter pylori
  misc_feature (B) LOCATION 1...54
  hypothetical: YES
NLLGFQSLKSDTMIWINQLKGKDMNEVVVVAAKRSAVGSFLGSLKNVGASPNGR

SEQ ID NO: 8122 - protein, 55 aa, Helicobacter pylori
  misc_feature (B) LOCATION 1...55
  hypothetical: YES
RMWALAQMGVSVLKDALNASSLKPSDVDSVILGNVLGAGLGQNIARQIQLARRYP

SEQ ID NO: 8123 - protein, 103 aa, Helicobacter pylori
  misc_feature (B) LOCATION 1...103
  hypothetical: YES
WCEYYHFMRAKKAQKLGLKTMATIKGFGLGGCSPDIMGICPSIAIKNNLKNIKMNLNDINLFELNEAFAAQSIAVLKELELNPNIVNVNGGDSDWPPYLRGRR

SEQ ID NO: 8124 - protein, 137 aa, Helicobacter pylori
  misc_feature (B) LOCATION 1...137
  hypothetical: YES
RCGFCYFRQCFRRWFGSKYRQTDPTGTPVSLMTETLLASIWICGSSMKAIQLAHNSIVLGCDEVVVCGGVENMSAAPYLSFDMREGKRMGNANMIDSMIHDGLWDAFNDYHMGITADNVAQAYHISREDQDAFALQS

SEQ ID NO: 8125 - protein, 391 aa, Helicobacter pylori
  misc_feature (B) LOCATION 1...391
  hypothetical: YES
MNEVVVVAAKRSAVGSFLGSLKNVGARQMGVSVLKDALNASSLKPSDVDSVILGNVLGAGLGQNIARQIQLDAGIPNDRNAFSVNMVCGSSMKAIQLAHDSIVLGCDEVVVCGGVENMSAAPYLSFDMREGKRMGNANMIDSMIHDGLWDAFNDYHMGITADNVAQAYHISREDQDAFALQSQLKARAAINAGKFQEEITPIEIANKKGVVVFKEDEYPRDTTLESLAKLKPAFKKDGSVTAGNSSGINDGASIIILCSAKKAQKLGLKTMATIKGFGLGGCSPDIMGICPSIAIKNNLKNIKMNLNDINLFELNEAFAAQSIAVLKELELNPNIVNVNGGAIAIGHPIGASGARILVTLLHEMKRSGHGVGCASLCVGGGQGLSVVVEQK

SEQ ID NO: 8126 - protein, 74 aa, Helicobacter pylori
  misc_feature (B) LOCATION 1...74
  hypothetical: YES
LKRSKLSSVPFLSKRQISKSVQAIKIDANNKAIKYPPSVDNTVHNRMLSGSLNFNTENTNPKKNPTTTEKWIKF

SEQ ID NO: 8127 - protein, 89 aa, Helicobacter pylori
  misc_feature (B) LOCATION 1...89
  hypothetical: YES
FKILATSFSLFLNSWLKRSKLSSVPFLSKRQISKSVQAIKIDANNKAIKYPPSVDNTVHNRMLSGSLNFNTENTNPKKNPTTTEKWIKF

SEQ ID NO: 8128 - protein, 155 aa, Helicobacter pylori
  misc_feature (B) LOCATION 1...155
  hypothetical: YES
MGICKMSCKRVVKLNQRVLNLAINTEFQVPLEHGIFSIEQSYCLEHAKEGEKGFFESHRQYVDFQLIIKGVEGAKVADINRAVIKTPYDEKRDLIVYEPVSEASFLHLDAGMLAIFLENDAHALRFYGESFEKYREEPIFKAVVKMPKGLIKLKL

SEQ ID NO: 8129 - protein, 158 aa, Helicobacter pylori
  misc_feature (B) LOCATION 1...158
  hypothetical: YES
KFCMGICKMSCKRVVKLNQRVLNLAINTEFQVPLEHGIFSIEQSYCLEHAKEGEKGFFESHRQYVDFQLIIKGVEGAKVADINRAVIKTPYDEKRDLIVYEPVSEASFLHLDAGMLAIFLENDAHALRFYGESFEKYREEPIFKAVVKMPKGLIKLKL

SEQ ID NO: 8130 - protein, 59 aa, Helicobacter pylori
  misc_feature (B) LOCATION 1...59
  hypothetical: YES
IYTGLPNKAYLDYMEIQEIIQNTMREKQYFLIEDALKDLSQILKTRYKKISEFFLKSAS

SEQ ID NO: 8131 - protein, 117 aa, Helicobacter pylori
  misc_feature (B) LOCATION 1...117
  hypothetical: YES
MKTKQAVHIHNLVFETILGILEFERLKPQKISVDLDLFYTELPNKAYLDYMEIQEIIQNTMREKQYLLIEDALKDLSQILKTRYKKISELFLKISKLEISPNSQVGASMKIYYETNL

SEQ ID NO: 8132 - protein, 333 aa, Helicobacter pylori
  misc_feature (B) LOCATION 1...333
  hypothetical: YES
LNKAWEYQTLALENPSVACMVLDKNHEILSLETHKKAKTPHAEVLAAKSALKILRPHLKSDLEKLEDPKILSDFLKTRHDNAFKDCVFLITLEPCNSYGKTPACSGLLEILKPKRVIIATEENEAKKGGLERLQKAHIETIICHNLENKAKNLLLPFRVMEQKGRFNLFKLALRMNGDYHHGKITGQKSVIFTHNQRAVCDTLIISGKTIRTDNPLLDARFCDSFYHNKNPNIAILSKRSISPHSKVFFAPNRLVNTFHDPKDLPLEKGFNFIEGGWGLFEGLRDKIDALLLHSHASMIGEAFNTLALKTPFKGRLLHAQILENEALLWIENS

SEQ ID NO: 8133 - protein, 344 aa, Helicobacter pylori
  misc_feature (B) LOCATION 1...344
  hypothetical: YES
MRLYESLLEICLNKAWEYQTLALENPSVACMVLDKNHEILSLETHKKAKTPHAEVLAAKSALKILRPHLKSDLEKLEDPKILSDFLKTRHDNAFKDCVFLITLEPCNSYGKTPACSGLLEILKPKRVIIATEENEAKKGGLERLQKAHIETIICHNLENKAKNLLLPFRVMEQKGRFNLFKLALRMNGDYHHGKITGQKSVIFTHNQRAVCDTLIISGKTIRTDNPLLDARFCDSFYHNKNPNIAILSKRSISPHSKVFFAPNRLVNTFHDPKDLPLEKGFNFIEGGWGLFEGLRDKIDALLLHSHASMIGEAFNTLALKTPFKGRLLHAQILENEALLWIENS

SEQ ID NO: 8134 - protein, 345 aa, Helicobacter pylori
  misc_feature (B) LOCATION 1...345
  hypothetical: YES
TMRLYESLLEICLNKAWEYQTLALENPSVACMVLDKNHEILSLETHKKAKTPHAEVLAAKSALKILRPHLKSDLEKLEDPKILSDFLKTRHDNAFKDCVFLITLEPCNSYGKTPACSGLLEILKPKRVIIATEENEAKKGGLERLQKAHIETIICHNLENKAKNLLLPFRVMEQKGRFNLFKLALRMNGDYHHGKITGHKRVIFTHHQRAVCDTLIISGKTIRTDNPLLDARFCDSFYHNKNPNIAILSKRSISPHSKVFFAPNRLVNTFHDPKDLPLEKGFNFIEGGWGLFEGLRDKIDALLLHSHASMIGEAFNTLALKTPFKGRLLHAQILENEALLWIENS

SEQ ID NO: 8135 - protein, 83 aa, Helicobacter pylori
  misc_feature (B) LOCATION 1...83
  hypothetical: YES
RSLNTKSNGRLIRLIKEAGILGVLGAGFDPGVTNAYVAHAQRHHFDTIHTLDILDCNAGDHKRPFATNFNPGINLRGVSFKGV

SEQ ID NO: 8136 - protein, 92 aa, Helicobacter pylori
  misc_feature (B) LOCATION 1...92
  hypothetical: YES
IVPIQFLYTCFRDPESLAIDTTGKTNIGCYMTGIKYNQDNTFYIYNVCDHKKCYEEVGSQAIRYTTGVPAMCAAKMICKDTWSVEHFKAGVF

SEQ ID NO: 8137 - protein, 135 aa, Helicobacter pylori
  misc_feature (B) LOCATION 1...135
  hypothetical: YES
LESRCSLHTVLQIGAGGVGSVVAHKMGMNRDVFKNIILASRSLDKCHVIKESMLKKGLGEIGVEQVDADDTQALIALIQKHKPKVVVNVALPYQDLTIMQACLETKTHYIDTANYEHPDLAKFEYKEQWAFDKAY

SEQ ID NO: 8138 - protein, 399 aa, Helicobacter pylori
  misc_feature (B) LOCATION 1...399
  hypothetical: YES
LHTVLQIGAGGVGSVVAHKMGMNRDVFKNIILASRSLDKCHAIKESMLKKGLGEIGVEQVDADDTQALIALIQKHKPKVVVNVALPYQDLTIMQACLETKTHYIDTANYEHPDLAKFEYKEQWAFDKAYKEAGILGVLGAGFDPGVTNAYVAHAQRHHFDTIHTLDILDCNAGDHKRPFATNFNPEINLREVSSKGRYYENGKWIETKPLEIKQVWAYPQIGEMDSYLLYHEELESLVKNVKGLRRARFFMTFSQNYLTHMKCLENVGMLGIKEIEHQGVKIVPIQFLKTLLPDPESLAKDTTGKTNIGCYMTGIKNNQDKTLYIYNVCDHKKCYEEVGSQAISYTTGVPAMCAAKMICNDTWSVEHFKAGVFNVEELNTDPFMEELIKQGLPYEVIER

SEQ ID NO: 8139 - protein, 95 aa, Helicobacter pylori
  misc_feature (B) LOCATION 1...95
  hypothetical: YES
VKLLGIKCDKKVPTNKAIAMRAKVSTKLDAVIRRCSLGVSKPLDTTPSKVSFSLVSLGSSLYLEIKYLATGPPIIPPLTKPKVAHAMPTSKLELK

SEQ ID NO: 8140 - protein, 139 aa, Helicobacter pylori
  misc_feature (B) LOCATION 1...139
  hypothetical: YES
AKNRLKLTFPITETSLSNTLWILKNDKAFLKITPTNKHHTKVGKVKLLGIKCDKKVPTNKAIAMRAKVSTKLDAVIRRCSLGVSKPLDTTPSKVSFSLVSLGSSLYLEIKYLATGPPIIPPLTKPKVAHAMPTSKLELK

SEQ ID NO: 8141 - protein, 144 aa, Helicobacter pylori
  misc_feature (B) LOCATION 1...144
  hypothetical: YES
MDRKLLRLYQPLNAYSYNSDSLFLYDFSRPFIKNSGAILDIGSGCGVLGLLCARDNPLASVHLVEKDSKMAFCSQKNALKFPNAQVFESDFLDFNPPILYDAIVCNPPFYALGSIKSQIKGHARHQSELDFASLVAKVKKCLKP

SEQ ID NO: 8142 - protein, 238 aa, Helicobacter pylori
  misc_feature (B) LOCATION 1...238
  hypothetical: YES
MDRKLLRLYQPLNAYSYNSDSLFLYDFSRPFIKNSGAILDIGSGCGVLGLLCARDNPLASVHLVEKDSKMAFCSQKNALKFPNAQVFESDFLDFNPPILYDAIVCNPPFYALGSIKSQIKGHARHQSELDFASLVAKVKKCLKPKGYFIFCYEALSLCLVIESLKSVKLTLETLRFVQSFKDKNAHLMLGAARNNSKSALKVLPPLITHNSKNQSDNTKEVLNIYQICNTYSIKAPLD

SEQ ID NO: 8143 - protein, 241 aa, Helicobacter pylori
  misc_feature (B) LOCATION 1...241
  hypothetical: YES
SPFMDRKLLRLYQPLNAYSYNSDSLFLYDFSRPFIKNSGAILDIGSGCGVLGLLCARDNPLASVHLVEKDSKMAFCSQKNALKFPNAQVFESDFLDFNPPILYDAIVCNPPFYALGSIKSQIKGHARHQSELDFASLVAKVKKCLKPKGYFIFCYEALSLCLVIESLKSVKLTLETLRFVQSFKDKNAHLMLGAARNNSKSALKVLPPLITHNSKNQSDNTKEVLNIYQICNTYSIKAPLD

SEQ ID NO: 8144 - protein, 71 aa, Helicobacter pylori
  misc_feature (B) LOCATION 1...71
  hypothetical: YES
NREAIKKALGNPVFPQDALDAALQIDKQLDSFKQDNLIDVKPLKDVLAQLEAELRKAIDFQKQWLNSTKPN

SEQ ID NO: 8145 - protein, 107 aa, Helicobacter pylori
  misc_feature (B) LOCATION 1...107
  hypothetical: YES
MQKFFSRFRRWALPFYFVSALAAIDIDEVTEAQANSIKLSDQLVSLSDKLLEKAVDRGRNTDHLKDLNDLHEKIKHLRLILEPKPKGKEDSPNLGGNKDMKTVEIGS

SEQ ID NO: 8146 - protein, 108 aa, Helicobacter pylori
  misc_feature (B) LOCATION 1...108
  hypothetical: YES
MQKFFSRFRRWALPFYFVSALAAIDIDEVTEAQANSIKLSDQLVSLSDKLLEKAVDRGRNTDHLKDLNDLHEKIKHLRLILEPKPKGKEDSPNLGGNKDMKTVEIGSG

SEQ ID NO: 8147 - protein, 175 aa, Helicobacter pylori
  misc_feature (B) LOCATION 1...175
  hypothetical: YES
MQKFFSRFRRWALPFYFVSALAAIDIDEVTEAQANSIKLSDQLVSLSDKLLEKAVDRGRNTDHLKDLNDLHEKIKHLRLILEPKPKDKENNPNLKDHQGSETIEIGEAIKKALGDPVFPQDALDAALQIDKQLDSFKQDNLIDVKPLKDVLAQLEAELRKAIDFQKQWLNSTKPN

SEQ ID NO: 8148 - protein, 326 aa, Helicobacter pylori
  misc_feature (B) LOCATION 1...326
  hypothetical: YES
VGFGKIRSKLNDQEKHDSLEEIYKATNEKNFLQLFLTDYANLFAAKVIKVSKEIDESLIPSYYKEKNLEVEDFFIISDLRELVREDFSLLRDQFLANSIAPNNHTYAIYGNNYVYPLPVRLKEERSYFLGDEKHYLSVYKSNEYLTMQENFMRFVFGKRLFYLLYPDSINNIIHAELELLQSENDLLNDFTSIIVKYTKTLEYEIYTFAKQVLLKACEKDPNLYDLAYKVQGKSFTLKDFFAKKPNLGSIKLLLKHEKVQDHLEENLKRFINYPFQKSLSLIQNIRNKAVHQKAPSLNEVEKLRNEILGIEGASLLKGVLTHKETS

SEQ ID NO: 8149 - protein, 370 aa, Helicobacter pylori
  misc_feature (B) LOCATION 1...370
  hypothetical: YES
RDQTKPQRNPKIRQGMNHLLILYNPYYQKDVIQQHLSVLQEKSQVGFGKIRSKLNDQEKHDSLEEIYKATNEKNFLQLFLTDYANLFAAKVIKVSKEIDESLIPSYYKEKNLEVEDFFIISDLRELVREDFSLLRDQFLANSIAPNNHTYAIYGNNYVYPLPVRLKEERSYFLGDEKHYLSVYKSNEYLTMQENFMRFVFGKRLFYLLYPDSINNIIHAELELLQSENDLLNDFTSIIVKYTKTLEYEIYTFAKQVLLKACEKDPNLYDLAYKVQGKSFTLKDFFAKKPNLGSIKLLLKHEKVQDHLEENLKRFINYPFQKSLSLIQNIRNKAVHQKAPSLNEVEKLRNEILGIEGASLLKGVLTHKETS

SEQ ID NO: 8150 - protein, 117 aa, Helicobacter pylori
  misc_feature (B) LOCATION 1...117
  hypothetical: YES
MARKRGYKETNMEESKKRTTLDRFPCTSCGLCCKNITGIIELVGFDAGNGVCKFLDLETNLCKIYESRPLICRIDEAHKKLYSHIPLKEFYAKNAEVCNALQEANRMDKSFRVIITK

SEQ ID NO: 8151 - protein, 126 aa, Helicobacter pylori
  misc_feature (B) LOCATION 1...126
  hypothetical: YES
DYGALKEEKMARKRGYKETNMEESKKRTTLDRFPCTSCGLCCKNITGIIELVGFDAGNGVCKFLDLETNLCKIYESRPLICRIDEAHKKLYSHIPLKEFYAKNAEVCNALQEANRMDKSFRVIITK

SEQ ID NO: 8152 - protein, 169 aa, Helicobacter pylori
  misc_feature (B) LOCATION 1...169
  hypothetical: YES
VRQHFVAQIIFKGVLMEHNGHDKLNGVLRGFLGDSFTLDGKEGGLNMSKMLEFIKKEKPKMNVLLMGATGVGKSSLINALFGKEITKTGVGKPITQHLEKYIDEEKGLILWDTKGIEDKDYHDTMQSIKKEMEDSFKTLDEKEAIDVAYLCVKETSSRVQERERVIKLR

SEQ ID NO: 8153 - protein, 170 aa, Helicobacter pylori
  misc_feature (B) LOCATION 1...170
  hypothetical: YES
SVRQHFVAQIIFKGVLMEHNGHDKLNGVLRGFLGDSFTLDGKEGGLNMSKMLEFIKKEKPKMNVLLMGATGVGKSSLINALFGKEITKTGVGKPITQHLEKYIDEEKGLILWDTKGIEDKDYHDTMQSIKKEMEDSFKTLDEKEAIDVAYLCVKETSSRVQERERVIKLR

SEQ ID NO: 8154 - protein, 338 aa, Helicobacter pylori
  misc_feature (B) LOCATION 1...338
  hypothetical: YES
LTARDFKNYLEPLREGKNLLGFSGGLDSTCLFHLLVGENIAFDIALVDYSTQKQRLEIIQHAQKLAQTHHKKCYIHYAPKIARNFEMQARKVRYDFFETLIKEHSYKHLILAHHLNDRLEWFLMQLSKGAGLNTLLSFQAYEKRESYAIVRPLLYTPKDTLKTLAKDQKFFEDDSNSSLKFKRNCFRKHYANALMQHYSKGIIQSFKFLDKEKERLYPLIPVSQMHGITFFKHSHNALFMVDKILKKKGYVLSFLQKEEIKHHFFSLEIAQKFIIEKDKEHVFIAFKPQKTLSMPKDFKDRARRLDIPKRLRPVLYAEFLKQPTHDFLTRFKQSLMDL

SEQ ID NO: 8155 - protein, 371 aa, Helicobacter pylori
  misc_feature (B) LOCATION 1...371
  hypothetical: YES
NFRHRRRELTQRRFNPQGNFIKAQPIQHAFSTDLTARDFKNYLEPLREGKNLLGFSGGLDSTCLFHLLVGENIAFDIALVDYSTQKQRLEIIQHAQKLAQTHHKKCYIHYAPKIARNFEMQARKVRYDFFETLIKEHSYKHLILAHHLNDRLEWFLMQLSKGAGLNTLLSFQAYEKRESYAIVRPLLYTPKDTLKTLAKDQKFFEDDSNSSLKFKRNCFRKHYANALMQHYSKGIIQSFKFLDKEKERLYPLIPVSQMHGITFFKHSHNALFMVDKILKKKGYVLSFLQKEEIKHHFFSLEIAQKFIIEKDKEHVFIAFKPQKTLSMPKDFKDRARRLDIPKRLRPVLYAEFLKQPTHDFLTRFKQSLMDL

SEQ ID NO: 8156 - protein, 54 aa, Helicobacter pylori
  misc_feature (B) LOCATION 1...54
  hypothetical: YES
RIARALNDAPVDYVVVHGRTRSDRYQKDKIDYESIALMKKILKKPVMPMAKLTA

SEQ ID NO: 8157 - protein, 146 aa, Helicobacter pylori
  misc_feature (B) LOCATION 1...146
  hypothetical: YES
KHRFNEKDFKKACDANGEIDSVKKAFEVLQITQADGLMIGRATLRAPWIFWQIRNNTTELPAVVKKDLVLEHFDKMVEFYGDRGVIMFRKNLHAYAKGEMQASAFRNCVNTLTEIKSMRESIEEFFNQEMLQSEVPLWVELNQKSV

SEQ ID NO: 8158 - protein, 154 aa, Helicobacter pylori
  misc_feature (B) LOCATION 1...154
  hypothetical: YES
MDFKNKKWLFLAPLAGYTDLPFRSVVKKFGVDVTTSEMVSSHSLVYAFDKTSKMLEKSPLEDHFMAQISGSKESVVKEAVEKINALDHVSGIDFNCGCPAPKVANHGNGSGLLKDLNHLVEILKVIRENTNKKITSVKVRLGFEKKIPKESLVP

SEQ ID NO: 8159 - protein, 328 aa, Helicobacter pylori
  misc_feature (B) LOCATION 1...328
  hypothetical: YES
MDFKNKKWLFLAPLAGYTDLPFRSVVKKFGVDVTTSEMVSSHSLVYAFDKTSKMLEKSPLEDHFMAQISGSKESVVKEAVEKINALDHVSGIDFNCGCPAPKVANHGNGSGLLKDLNHLVEILKVIRENTNKKITSVKVRLGFEKKIPKEIAHALNDAPVDYVVVHGRTRSDRYQKDKIDYESIALMKKILKKPVIANGEIDSVKKAFEVLQITQADGLMIGRATLRAPWIFWQIRNNTTELPAVVKKDLVLEHFDKMVEFYGDRGVIMFRKNLHAYAKGEMQASAFRNCVNTLTEIKSMRESIEEFFNQEMLQSEVPLWVELNQKSV

SEQ ID NO: 8160 - protein, 91 aa, Helicobacter pylori
  misc_feature (B) LOCATION 1...91
  hypothetical: YES
KATDMQVKENKQLCLISLGCSKNLVDSEVMLGKLYNYTLTNDAKKADVILINTCGFIESAKQESIPNHSQRSQRQKRGSDFNCERVLERAL

SEQ ID NO: 8161 - protein, 169 aa, Helicobacter pylori
  misc_feature (B) LOCATION 1...169
  hypothetical: YES
SLSTLAVLLKALNKRVFQTILNAAKDKKEGAILIASGCLSERYKDEIKELIPEVDIFTGVGDYDKIDILIAKKQNQFSEQVFLSEHYNARIITGSSVHAYVKISEGCNQKCSFCAIPSFKGKLQSRELDSILKEVEDLALKGYKDMTFIAQDSSSFLSDRAKSRLDPAH

SEQ ID NO: 8162 - protein, 227 aa, Helicobacter pylori
  misc_feature (B) LOCATION 1...227
  hypothetical: YES
SSSLERLPASLKDARILYLYPSSTTLELIGAIEDSPIFQNYFYMPIQHISDSMLKKMRRNSSQAHHLKLLNAMKQVKESFIRSTIIVGHPEENESEFEELSAFLDEFRFDRLNIFAFSAEENTHAYSLEKVPKKIINARIKALNKIALKHQNHSFKALLNKPIKALVEHKEGEYFYKARDLRWAPEVDGEILINDSELTTPLKPGHYTIVPSAFKDNILLAKVLSPF

SEQ ID NO: 8163 - protein, 439 aa, Helicobacter pylori
  misc_feature (B) LOCATION 1...439
  hypothetical: YES
MQVKENKQLCLISLGCSKNLVDSEVMLGKLYNYTLTNDAKKADVILINTCGFIESAKQESIQTILNAAKDKKEGAILIASGCLSERYKDEIKELIPEVDIFTGVGDYDKIDILIAKKQNQFSEQVFLSEHYNARIITGSSVHAYVKISEGCNQKCSFCAIPSFKGKLQSRELDSILKEVEDLALKGYKDMTFIAQDSSSFLYDKGQKDGLIQLIRAIDKQQALKSARILYLYPSSTTLELIGAIEDSPIFQNYFDMPIQHISDSMLKKMRRNSSQAHHLKLLNAMKQVKESFIRSTIIVGHPEENESEFEELSAFLDEFRFDRLNIFAFSAEENTHAYSLEKVPKKIINARIKALNKIALKHQNHSFKALLNKPIKALVEHKEGEYFYKARDLRWAPEVDGEILINDSELTTPLKPGHYTIVPSAFKDNILLAKVLSPF

SEQ ID NO: 8164 - protein, 120 aa, Helicobacter pylori
  misc_feature (B) LOCATION 1...120
  hypothetical: YES
EKSIKDLQSIFKNADGRDEKLKRFNQEALEVFQKLERESLKELESLKNNEEWENFTIAFYGETGAGKSTLIECLRMFFKEQSKVDQQERFQAALFNLPIQPSKLYFAGCARDRRQRKKGY

SEQ ID NO: 8165 - protein, 119 aa, Helicobacter pylori
  misc_feature (B) LOCATION 1...119
  hypothetical: YES
KSIKDLQSIFKNADGRDEKLKRFNQEALEVFQKLERESLKELESLKNNEEWENFTIAFYGETGAGKSTLIECLRMFFKEQSKVDQQERFQAALFNLPIQPSKLYFAGCARDRRQRKKGY

SEQ ID NO: 8166 - protein, 132 aa, Helicobacter pylori
  misc_feature (B) LOCATION 1...132
  hypothetical: YES
MRAKMKDIYLDVEKSIKDLQSIFKNADGRDEKLKRFNQEALEVFQKLERESLKELESLKNNEEWENFTIAFYGETGAGKSTLIECLRMFFKEQSKVDQQERFQAALFNLPIQPSKLYFAGCARDRRQRKKGY

SEQ ID NO: 8167 - protein, 147 aa, Helicobacter pylori
  misc_feature (B) LOCATION 1...147
  hypothetical: YES
LRFFFFVKNASEKFDMRAKMKDIYLDVEKSIKDLQSIFKNADGRDEKLKRFNQEALEVFQKLERESLKELESLKNNEEWENFTIAFYGETGAGKSTLIECLRMFFKEQSKVDQQERFQAALFNLPIQPSKLYFAGCARDRRQRKKGY

SEQ ID NO: 8168 - protein, 74 aa, Helicobacter pylori
  misc_feature (B) LOCATION 1...74
  hypothetical: YES
LKKERTESLVAQALKNIGNDRYMLDNLVFARVKQLNAGAKTLVNMDPKRHKLVDIAIREIAEGKIDIDRIDERN

SEQ ID NO: 8169 - protein, 99 aa, Helicobacter pylori
  misc_feature (B) LOCATION 1...99
  hypothetical: YES
APTRRVFYGKISPLKLDRTQNKRITLKKERTESLVAQALKNIGNDRYMLDNLVFARVKQLNAGAKTLVNMDPKRHKLVDIAIREIAEGKIDIDRIDERN

SEQ ID NO: 8170 - protein, 91 aa, Helicobacter pylori
  misc_feature (B) LOCATION 1...91
  hypothetical: YES
SAKRVLMPHFLAKVDSKPLEYPLIRGDFCYHREFLSLKHPTKSCVHASFKNDVFLLQKIRRAGDFLIKSEKGNALKKRDFKTSFEDLFAIF

SEQ ID NO: 8171 - protein, 155 aa, Helicobacter pylori
  misc_feature (B) LOCATION 1...155
  hypothetical: YES
KIYNSEIEIKKNAQIPVVSKYEARWNKLKKDIYDLKIYSLGLDENPTQNHALDFSFDTITIDKESVGAILKTPKIIKEGYFVHVCNIYENKGDFLVELSMGDFDWPVRLFVLLAENQVFYLNKSPLKTLNNHKAHLLLQNILSQKELDERNHRSE

SEQ ID NO: 8172 - protein, 189 aa, Helicobacter pylori
  misc_feature (B) LOCATION 1...189
  hypothetical: YES
SKAKKATPLKREILKQALRIYSQSFEVISHNLQENSKHASQKKALDLETFEDFIQKNQAPILIEIGFGSGRHLIELAKNNPTTTCLGIEIHTPSIAQALKQIELLDLKNLHILQGDGRLVLESMPNHRCEKIFVHFPVPWNEKKHRRVLSEKFLNEALRVLKPRGFMELRTDDSLCFEDSLKLALKNLQ

SEQ ID NO: 8173 - protein, 400 aa, Helicobacter pylori
  misc_feature (B) LOCATION 1...400
  hypothetical: YES
MPHFLAKLDSKPLEYPLIRGDFCFHREFLSLKHPTKSCVHASFKNDVFLLQKIRRAGDFLIKSEKATPLKREILKQALRIYSQSFEVISHNLQENSKHASQKKALDLETFEDFIQKNQAPILIEIGFGSGRHLIELAKNNPTTTCLGIEIHTPSIAQALKQIELLDLKNLHILQGDGRLVLESMPNHRCEKIFVHFPVPWNEKKHRRVLSEKFLNEALRVLKPRGFLELRTDDSLCFEDSLKLALKNFQCEIEIKKNAQIPVVSKYEARWNKLKKDIYDLKIYSLGLDENPTQNHALDFSFDTITIDKESVGAILKTPKIIKEGYFVHVCNIYENKGDFLVELSMGDFDWPVRLFVLLAENQVFYLNKSPLKTLNNHKAHLLLQNILSQKELDERDHRSE

SEQ ID NO: 8174 - protein, 79 aa, Helicobacter pylori
  misc_feature (B) LOCATION 1...79
  hypothetical: YES
MNSPDVLLDSFKIALVKKDSKLAFSLIERLSLEQIKSLDLDALLSLKEMIAQSIELLEKEKEELQSQMHKAKQIQKFLS

SEQ ID NO: 8175 - protein, 87 aa, Helicobacter pylori
  misc_feature (B) LOCATION 1...87
  hypothetical: YES
RHGGKSIQMNSPDVLLDSFKIALVKKDSKLAFSLIERLSLEQIKSLDLDALLSLKEMIAQSIELLEKEKEELQSQMHKAKQIQKFLS

SEQ ID NO: 8176 - protein, 163 aa, Helicobacter pylori
  misc_feature (B) LOCATION 1...163
  hypothetical: YES
MNMQHLYAPWRESYLKEKNKSCVFCGISQNPTKDSENRVLYRNSDLFVVMNAYPYNPGHLLIVPHAHQASVELLDLNTWLNMNALAPKILKALYAYGAQGINLGLNLHRNAGAGIPEHLHMHLVPRFLGDSNFISVIAQTRVCGMDLNETYLALKNLLEKELG

SEQ ID NO: 8177 - protein, 101 aa, Helicobacter pylori
  misc_feature (B) LOCATION 1...101
  hypothetical: YES
MFSKICASFKLANAFKGFICKRISSPMQSTRITKMVLGIKDAFNDDKDPLNNACEALDLVVKFKKEHPQDFNELFEILKDLIQEYEQNPDEIKQNLKEILK

SEQ ID NO: 8178 - protein, 104 aa, Helicobacter pylori
  misc_feature (B) LOCATION 1...104
  hypothetical: YES
GKAMFSKICASFKLANAFKGFICKRISSPMQSTRITKMVLGIKDAFNDDKDPLNNACEALDLVVKFKKEHPQDFNELFEILKDLIQEYEQNPDEIKQNLKEILK

SEQ ID NO: 8179 - protein, 327 aa, Helicobacter pylori
  misc_feature (B) LOCATION 1...327
  hypothetical: YES
MQKVFIAPTHYKRIDEFLAKELQISKNQVLNLIKEGLVFCQKKEVKKGGLALKEGDAITLLTPKIVPKPLKKELDLEIEVIFEDEDLLVLNKPPNLVVHKAPSVKEPTLVDWLKSQNYELSNLGLKERYGIVHRLDKDTSGGIVIAKNNFTHVCLSEQLKTKMMGRYYIALLSTPLKEEKMSVECYLTRNPNNRLKMIALKAAKKEKSRYSKSEFTSLLTSQNGMDLIGAKLFTGRTHQIRAHLEYLNRHIIGDNLYGLNGVLSKEEIRIMLHAYLIEFKHPRSEQKLRFKVPLLKDMLEYLKKVFDKENLDEVLDEEKILHAFIAK

SEQ ID NO: 8180 - protein, 327 aa, Helicobacter pylori; identical to SEQ ID NO: 8179
  misc_feature (B) LOCATION 1...327
  hypothetical: YES

SEQ ID NO: 8181 - protein, 277 aa, Helicobacter pylori
  misc_feature (B) LOCATION 1...277
  hypothetical: YES
LDAFTELNTELNTELNARKKQYQYYQNMLLDFNDINQSRKDAKERLAQKPYPKRLKTLLQTLAPKGVGFRKLGEVCESTNKKTLKISEVSEVKNKGMYPVINSGRELYGYYHDFNNDGENITIASRGEYAGFINYFNEKFFAGGLCYPYKVKDTNELLTKFLYFYLKTNETQIMENLVFRGSIPALNKADIETLTIPIPPLEIQQEIVTILDAFTELNTELNTELNARKKQYQYYQNMLLDFNDINQSRKDAKERLAQKPYPKRLKTLLQTLAPRGW

SEQ ID NO: 8182 - protein, 447 aa, Helicobacter pylori
  misc_feature (B) LOCATION 1...447
  hypothetical: YES
VEFKTLEEVFEIRNGYTPSKNNPEFWKNGTIPWFRMEDLRENGRILKDSIQHITPKALKGKKLFPKNSIIISTTATIGEHALLIVDSLANQQFTFLSKKANCDIALDMKFFFYQCFLLGEWCKNNTNVSGFASVDMTAFKKYKFPIPPLEIQQEIVTILDAFTELNTELNARKKQYEYYQNMLLDFNDINQSRKDTKEKLAQKPYPKRLKTLLQTLAPKGVGFRKLGEVCESTNKKTLKISEVSEVKNKGMYPVINSGRELYGYYHDFNNDGENITIASRGEYAGFINYFNEKFFAGGLCYPYKVKDTNELLTKFLYFYLKTNETQIMENLVFRGSIPALNKADIETLTIPIPPLEIQQEIVTILDAFTELNTELNTELNARKKQYQYYQNMLLDFNDINQSRKDAKERLAQKPYPKRLKTLLQTLAPRGWGLGSWGRCVKAPIKNS

SEQ ID NO: 8183 - protein, 253 aa, Helicobacter pylori
  misc_feature (B) LOCATION 1...253
  hypothetical: YES
MAYEISKKVLHIVGKTNATYKLIEEGDKILLGLSGGKDSIMLACILARMQKHAPFKFDFKAVTVHYGLGENLKWLSDLCQEQGIEHEIIYTQIAATINEKRREKSSFCSFCSRLRRGTLYSKALGEGYNKVAIAHHLDDAVESFFMNFTYNGSLRSMPPIYRAENGLLVIRPLIKVREASSIHFVTSQNIRVAPDCNCPAKQPTSDKPPIARLATKNFLKEMQNLHPHFFDSLENAFNNVQANSFSDAKYLDA

SEQ ID NO: 8184 - protein, 258 aa, Helicobacter pylori
  misc_feature (B) LOCATION 1...258
  hypothetical: YES
NQGSKMAYEISKKVLHIVGKTNATYKLIEEGDKILLGLSGGKDSIMLACILARMQKHAPFKFDFKAVTVHYGLGENLKWLSDLCQEQGIEHEIIYTQIAATINEKRREKSSFCSFCSRLRRGTLYSKALGEGYNKVAIAHHLDDAVESFFMNFTYNGSLRSMPPIYRAENGLLVIRPLIKVREASSIHFVTSQNIRVAPDCNCPAKQPTSDKPPIARLATKNFLKEMQNLHPHFFDSLENAFNNVQANSFSDAKYLDA

SEQ ID NO: 8185 - protein, 349 aa, Helicobacter pylori
  misc_feature (B) LOCATION 1...349
  hypothetical: YES
MSVNAPKRMRILLRLPNWLGDGVMASSLFYTLKHHYPNAHFILVGPTITCELFKKDEKIEAVFTDDTKKSFFRLLATYKLAQKIGRCDIAIALNNHFYSAFLLYATKTPIRIGFAQFFRSLFLSHAITTAPKEYHQVEKYCFLFSQFLKKELDQKSVLPLKLAFDLPTHTPNTPKKIGFNPSASYGSAKRWPASYYAEVAVALLEKGHEIYFFGAKEDAIVSEEILKSVKNLLKNPLLFHNAYNLCGKTSIEELIQRIAILDLFITNDSGPMHVAASTQTPLIALFGPTDEKETRPYKAQKAIVLNHHLSCAPCKKRVCPLKNEKNHLCMKSITPLEVLQAAHTLLEES

SEQ ID NO: 8186 - protein, 358 aa, Helicobacter pylori
  misc_feature (B) LOCATION 1...358
  hypothetical: YES
LKIFKKGLLMSVNAPKRMRILLRLPNWLGDGVMASSLFYTLKHHYPNAHFILVGPTITCELFKKDEKIEAVFTDDTKKSFFRLLATYKLAQKIGRCDIAIALNNHFYSAFLLYATKTPIRIGFAQFFRSLFLSHAITTAPKEYHQVEKYCFLFSQFLKKELDQKSVLPLKLAFDLPTHTPNTPKKIGFNPSASYGSAKRWPASYYAEVAVALLEKGHEIYFFGAKEDAIVSEEILKSVKNLLKNPLLFHNAYNLCGKTSIEELIQRIAILDLFITNDSGPMHVAASTQTPLIALFGPTDEKETRPYKAQKAIVLNHHLSCAPCKKRVCPLKNEKNHLCMKSITPLEVLQAAHTLLEES

SEQ ID NO: 8187 - protein, 229 aa, Helicobacter pylori
  misc_feature (B) LOCATION 1...229
  hypothetical: YES
PLHPPLNRRHIILHSLNAPDPFRVSYIARYLLQDAKEITNVRNMLGFSGKYKGKGISLMGHGMGIASCTIYVTELIKTYQVKELLRIGTCGAISPKVGLKDIVMATGASTDSKTNRVRFLNHDLSATPDFELSLRAYQTAKRLGIDLKIGNVFSSDFFYSFETHAFGLMAQYNHLAIEMEAAGLYATAMELNAKALCLCSVSDHLITKEALSPKERIESFDNMITLALE

SEQ ID NO: 8188 - protein, 231 aa, Helicobacter pylori
  misc_feature (B) LOCATION 1...231
  hypothetical: YES
MTPHINAKIGDFYPQCLLCGDPLRVSYIAKNFLQDAKEITNVRNMLGFSGKYKGKGISLMGHGMGIASCTIYVTELIKTYQVKELLRIGTCGAISPKVGLKDIVMATGASTDSKTNRVRFLNHDLSATPDFELSLRAYQTAKRLGIDLKIGNVFSSDFFYSFETHAFGLMAQYNHLAIEMEAAGLYATAMELNAKALCLCSVSDHLITKEALSPKERIESFDNMITLALEM

SEQ ID NO: 8189 - protein, 104 aa, Helicobacter pylori
  misc_feature (B) LOCATION 1...104
  hypothetical: YES
GYFNPFFRKLMNQRIEMITALLDEKKAFDITHIDLSKTPYLVEDVIIATTLANKHALSLLDALKNTLKPLGEVFYQIDESNGEWIILDLGDLMIHLFTGECRKI

SEQ ID NO: 8190 - protein, 113 aa, Helicobacter pylori
  misc_feature (B) LOCATION 1...113
  hypothetical: YES
MNQRIEMITALLDEKKAFDITHIDLSKTPYLVEDVIIATTLANKHALSLLDALKNTLKPLGEVFYQIDESNGEWIILDLGDLMIHLFTEECRKKFDLEGFLNAYKRGLPYQNA

SEQ ID NO: 8191 - protein, 77 aa, Helicobacter pylori
  misc_feature (B) LOCATION 1...77
  hypothetical: YES
MAHHEQQHQAQQQQQQANSQHHHHHHVHHHHYYGGEHHHHNAQQHAEQQAEQHAQQQQQQQAHQQQQQKAQQQNQQY

SEQ ID NO: 8192 - protein, 93 aa, Helicobacter pylori
  misc_feature (B) LOCATION 1...93
  hypothetical: YES
ISIKGVIMAHHEQQHQAQQQQQQANSQHHHHHHVHHHHYYGGEHHHHNAQQHAEQQAEQHAQQLATTTSTPTTTTKSATTKPTILIGAFMGRP

SEQ ID NO: 8193 - protein, 135 aa, Helicobacter pylori
  misc_feature (B) LOCATION 1...135
  hypothetical: YES
NAYIFEYNSDLLEAFPNPNPNLDPVITLECKEFTSLCPITSQPDFGVIFIRYIPKDKMVESKSLKLYLFSYRNHGSFHESCINTILLDLVQLLEPKYLEVYGDFVSRGGIAIKPFVNYAIKEYQDFKEKRLLDAK

SEQ ID NO: 8194 - protein, 148 aa, Helicobacter pylori
  misc_feature (B) LOCATION 1...148
  hypothetical: YES
MTPESNLKSLGAKTPYIFEYNSDLLEAFPNPNPNLDPLITLECKEFTSLCPITSQPDFGVIFIRYIPKDKMVESKSLKLYLFSYRNHGSFHESCINTILLDLVQLLEPKYLEVYGDFVSRGGIAIKPFVNYAIKEYQDFKEKRLLDAK

SEQ ID NO: 8195 - protein, 60 aa, Helicobacter pylori
  misc_feature (B) LOCATION 1...60
  hypothetical: YES
MAHHEEQHGGHHHHHHHTHHHHYHGGEHHHHHHSSHHEEGCCSTSDSHHQEEGCCHGHHE

SEQ ID NO: 8196 - protein, 60 aa, Helicobacter pylori
  misc_feature (B) LOCATION 1...60
  hypothetical: YES
MAHHXEQHGGHHHHHHHTHHHHYHGGEHHHHHHSSHHEEGCCSTSDSHHQEEGCCHGXHE

SEQ ID NO: 8197 - protein, 78 aa, Helicobacter pylori
  misc_feature (B) LOCATION 1...78
  hypothetical: YES
NKILASELEFKFLIKGVIMAHHEEQHGGHHHHHHHTHHHHYHGGEHHHHHHSSHHEEGCCSTSDSHHQEEGCCHGHHE

SEQ ID NO: 8198 - protein, 120 aa, Helicobacter pylori
  misc_feature (B) LOCATION 1...120
  hypothetical: YES
MPLKSLKNRLNQHFELSPRYGSVKKIMPNIVYADGFNPSVGDVVKIEKSDGTECVGMVVVAEKEQFGFTPFNFIEGARAGDKVLFLKEGLNFPVGRNLLGRVLNPLGQVIDNKGVLDYGD

SEQ ID NO: 8199 - protein, 120 aa, Helicobacter pylori
  misc_feature (B) LOCATION 1...120
  hypothetical: YES
MPLKSLKNRLNQHFELSPRYGSVKKIMPNIVYADGFNPSVGDVVKIEKSDGTECVGMVVVVEKEQFGFTPFNFIEGARAGDKVLFLKEGLNFPVGRNLLGRVLNPLGQVIDNKGVLDYGD

SEQ ID NO: 8200 - protein, 51 aa, Helicobacter pylori
  misc_feature (B) LOCATION 1...51
  hypothetical: YES
MGFQNENKLKVGASVKATINDKVVEAKVISIGFNRVTLRSEKGQRSHLRFQ

SEQ ID NO: 8201 - protein, 74 aa, Helicobacter pylori
  misc_feature (B) LOCATION 1...74
  hypothetical: YES
KTLKNIERPIIAEFKTNFTKEYFMGFQNENKLKVGASVKATINDKVVEAKVISIGFNRVTLRSEKGQRSHLRFQ

SEQ ID NO: 8202 - protein, 62 aa, Helicobacter pylori
  misc_feature (B) LOCATION 1...62
  hypothetical: YES
HNSYAMAVSIGIISLVRGLTENLLKDVIPHIGLETDDEYLKELDADDELAKNSDEWVVSLKN

SEQ ID NO: 8203 - protein, 240 aa, Helicobacter pylori
  misc_feature (B) LOCATION 1...240
  hypothetical: YES
LTEHMRLHAENEKSGEDLLKDVKVVTSGPSVKDRTSTPKEPKEKEDRFKLMFDFGDVKTNFMAIAEGSVLSERKGRLGQLMSPLVYRGNGFHASLVIMWALSFASQLKHHNDHEWAKMLENRNVDECWFETFDHMDNTDLRLFCDILGAYAQGQEETLNLTKLWAVMLPKNQKEAYFVAQLLCDGGINRYNLSCAGLTENLLKDVIPHIGLETDNEYLKELDADDELAKNSDEWVVSLKN

SEQ ID NO: 8204 - protein, 86 aa, Helicobacter pylori
  misc_feature (B) LOCATION 1...86
  hypothetical: YES
LPLSPIKAITLMGAKQPLVIMPISVDLPTPEPAKMPSFCPLPQVKSPSMLFTPTLKTSSIKPLFKGAMGVVITGANRHNLAPPYCQ

SEQ ID NO: 8205 - protein, 142 aa, Helicobacter pylori
  misc_feature (B) LOCATION 1...142
  hypothetical: YES
MMNNTSSPWFLKYSATLIAQKAPYLRIKGLSSLVATTNTQELKSPFKFFSINSGISLPLSPIKAITLMGAKQPLVIMPISVDLPTPEPAKMPSFCPLPQVKSPSMLFTPTLKTSSIKPLFKGAMGVVITGANRHNLAPPYCQ

SEQ ID NO: 8206 - protein, 199 aa, Helicobacter pylori
  misc_feature (B) LOCATION 1...199
  hypothetical: YES
MLETTIDFSRYSSVKIGAPLKVSVLENDNEISQEHQIIGLANNLLIAPDVKNLALLGKNYDYICDKGEWVEVGGAANASKIFNYFRANDLEGLEFLGQLPGTLGALVKMNAGMKEFEIKNVLESACVNGEWLEKEALGLDYRSSGFNGVVLRARFKKTHGFREGVLKACKSMRKSHPKLPNFGSCFKNPPNDYAGRLLE

SEQ ID NO: 8207 - protein, 259 aa, Helicobacter pylori
  misc_feature (B) LOCATION 1...259
  hypothetical: YES
MLETTIDFSRYSSVKIGAPLKVSVLENDNEISQEHQIIGLANNLLIAPDVKNLALLGKNYDYICDKGEWVEVGGAANASKIFNYFRANDLEGLEFLGQLPGTLGALVKMNAGMKEFEIKNVLESACVNGEWLEKEALGLDYRSSGFNGVVLRARFKKTHGFREGVLKACKSMRKSHPKLPNFGSCFKNPPNDYAGRLLEGVGLRGYCLKRVGFAKEHANFLVNLGGAEFEEALDLIELAKTRVLQEYGIHLEEEVKILR

SEQ ID NO: 8208 - protein, 261 aa, Helicobacter pylori
  misc_feature (B) LOCATION 1...261
  hypothetical: YES
KMLETTIDFSRYSSVKIGAPLKVSVLENDNEISQEHQIIGLANNLLIAPDVKNLALLGKNYDYICDKGEWVEVGGAANASKIFNYFRANDLEGLEFLGQLPGTLGALVKMNAGMKEFEIKNVLESACVNGEWLEKEALGLDYRSSGFNGVVLRARFKKTHGFREGVLKACKSMRKSHPKLPNFGSCFKNPPNDYAGQAFRGRGLKGLLSKKSGALPKQHANFLVNLGGAEFEEALDLIELAKTRVLQEYGIHLEEEVKILR

SEQ ID NO: 8209 - protein, 243 aa, Helicobacter pylori
  misc_feature (B) LOCATION 1...243
  hypothetical: YES
MVLMIFTSILKIALKVLSERKKNRYGFPRIFDVADIEQEEREVIEWREKKKASKQSYKQNLQINKIANDLKRDKIVDKRTILSVIDADIERGFIPPKDLLKQLEKISASLSKDIVITIKQVEKLELNYALIDNIQHNTLDDTLDFTFIVGDSLSVQSLYVTFNLVIDIDRPMSEQFLNHIGKLGSFESREQALEWVRLSQTKLIIETPKEALKNAELSQIEEILTGCIFNGAYRLQNDLKKGR

SEQ ID NO: 8210 - protein, 243 aa, Helicobacter pylori
  misc_feature (B) LOCATION 1...243
  hypothetical: YES
MVLMIFTSILKIALKVLSERKKNRYGFPRIFDVADIEQEEREVIEWREKKKASKQSYKQNLQINKIANDLKRDKIVDKRTILSVIDADIERGFIPPKDLLKQLEKISASLSKDIVITIKQVEKLELNYALIDNIQHNTLDDTLDFTFIVGDSLSVQSLYVTFNLVIDIDRPMSEQFLNXIGKLGSFESREQALEWVRLSQTKLIIETPKEALKNAELSQIEEILTGCIFNGAYRLQNDLKKGR

SEQ ID NO: 8211 - protein, 256 aa, Helicobacter pylori
  misc_feature (B) LOCATION 1...256
  hypothetical: YES
DSNRSAFICHNLAMVLMIFTSILKIALKVLSERKKNRYGFPRIFDVADIEQEEREVIEWREKKKASKQSYKQNLQINKIANDLKRDKIVDKRTILSVIDADIERGFIPPKDLLKQLEKISASLSKDIVITIKQVEKLELNYALIDNIQHNTLDDTLDFTFIVGDSLSVQSLYVTFNLVIDIDRPMSEQFLNHIGKLGSFESREQALEWVRLSQTKLIIETPKEALKNAELSQIEEILTGCIFNGAYRLQNDLKKGR

SEQ ID NO: 8212 - protein, 84 aa, Helicobacter pylori
  misc_feature (B) LOCATION 1...84
  hypothetical: YES
MRIDKFLQSVGLVKRRVLATDMCNVGAVWLNGSCAKPSKEVKTGDVISLHYLKGIEEYTILQIPTLKNVPRKDTHLYIAPKTKE

SEQ ID NO: 8213 - protein, 87 aa, Helicobacter pylori
  misc_feature (B) LOCATION 1...87
  hypothetical: YES
NKRMRIDKFLQSVGLVKRRVLATDMCNVGAVWLNGSCAKPSKEVKTGDVISLHYLKGIEEYTILQIPTLKNVPRKDTHLYIAPKTKE

SEQ ID NO: 8214 - protein, 145 aa, Helicobacter pylori
  misc_feature (B) LOCATION 1...145
  hypothetical: YES
MPKTLWSQSLPTAIFHTDPSITDWSATYKTTTTQTTQPYLRPAQDNEKHPTTYNLITTQTTINRTQSVLKNELHLSNDYLKYVEIHQGYYKDNDLKQSQAILIGLITTSIKVKAFALNITFGVKAQRLVRIGIIGMIIKSLALKD

SEQ ID NO: 8215 - protein, 153 aa, Helicobacter pylori
  misc_feature (B) LOCATION 1...153
  hypothetical: YES
MPKTLWSQSLPTAIFHTDPSITDWSATYKTTTTQTTQPYLRPAQDNEKHPTTYNLITTQTTINRTQSVLKNELHLSNDYLKYVEIHQGYYKDNDLKQSQGYIDWTNYYLNQSEGFCSQYNIWSESTKIGKNWYHWHDNKISCAQRLIYRPFQG

SEQ ID NO: 8216 - protein, 156 aa, Helicobacter pylori
  misc_feature (B) LOCATION 1...156
  hypothetical: YES
ERTMPKTLWSQSLPTAIFHTDPSITDWSATYKTTTTQTTQPYLRPAQDNEKHPTTYNLITTQTTINRTQSVLKNELHLSNDYLKYVEIHQGYYKDNDLKQSQGYIDWTNYYLNQSEGFCSQYNIWSESTKIGKNWYHWHDNKISCAQRLIYRPFQG

SEQ ID NO: 8217 - protein, 233 aa, Helicobacter pylori
  misc_feature (B) LOCATION 1...233
  hypothetical: YES
MTDNNQNNENHENSSENSKDHHEARAGAFERFTNRKKRFRENAQKNAESSNHETLSHHKKEHRPNKKPNNHHKPKHASQKTRNYAKEELDNNKVEGVTEILHVNERGTLGFHKELKKGVEANNKIQVEHLNPHYKMNLNSKASVKITPLGGLGEIGGNMMVIETPKSAIVIDAGMSFPKEGLFGVDILIPDFSYLHQIKDKIAGIIITHAHEDHIGPRLICLKSCNSPFMARL

SEQ ID NO: 8218 - protein, 74 aa, Helicobacter pylori
  misc_feature (B) LOCATION 1...74
  hypothetical: YES
VVSPASTWISRVLAYSGYCYLRTPCRIQGYHFLWLTFPGNSAKAFSWILQSSTPNASTRFALFPVRSPLLRESR

SEQ ID NO: 8219 - protein, 77 aa, Helicobacter pylori
  misc_feature (B) LOCATION 1...77
  hypothetical: YES
GWRVVSPASTWISRVLAYSGYCYLRTPCRIQGYHFLWLTFPGNSAKAFSWILQSSTPNASTRFALFPVRSPLLRESR

SEQ ID NO: 8220 - protein, 106 aa, Helicobacter pylori
  misc_feature (B) LOCATION 1...106
  hypothetical: YES
NSHSLGVSVLRSRIEEAKNHFNEKEKGPNKRFSDKEFKKFLKDRAKNGMTNEEMQVLLLMINNKKGNLRPSHKEFLQECLIEAVLHNKNINKTTEYSTRKHSHFDA

SEQ ID NO: 8221 - protein, 255 aa, Helicobacter pylori
  misc_feature (B) LOCATION 1...255
  hypothetical: YES
MTNEEMQVLLLMINNKKGNLRPSHKEFLQECLIEAVLHNKNINKTTEYAIRNNIAHLPINKTEGFLVRTYNHSLGIFNENIAEKLKIPKKEKEILQPLNANEKQVLNTALENNEIDARTFKPWDLGSKEASKENASMSEELTQNNSKLSHFNENSIAQNSVGQNNVKEPNTKSNNSKQNHSLSNSDLTSNTDYNKLVADMFENQMDANGNYIGKKFSTQAYDNKTPYKVATGNASEYSSYLYSKKTKSKDIGMER

SEQ ID NO: 8222 - protein, 303 aa, Helicobacter pylori
  misc_feature (B) LOCATION 1...303
  hypothetical: YES
NSHSLGVSVLRSRIEEAKNHFNEKEKGPNKRFSDKEFKKFLKDRAKNGMTNEEMQVLLLMINNKKGNLRPSHKEFLQECLIEAVLHNKNINKTTEYAIRNNIAHLPINKTEGFLVRTYNHSLGIFNENIAEKLKIPKKEKEILQPLNANEKQVLNTALENNEIDARTFKPWDLGSKEASKENASMSEELTQNNSKLSHFNENSIAQNSVGQNNVKEPNTKSNNSKQNHSLSNSDLTSNTDYNKLVADMFENQMDANGNYIGKKFSTQAYDNKTPYKVATGNASEYSSYLYSKKTKSKDIGMER

SEQ ID NO: 8223 - protein, 141 aa, Helicobacter pylori
  misc_feature (B) LOCATION 1...141
  hypothetical: YES
VYGEIVQEPRFYLDNGECELGYFYAEATSFILTGEHLRYLLGMLHSKLITFAFKTFYAGGGLGESGYRYKKAFIERLPIPKITEKNQELADKITDCAEQILALKAKDPKANTQKLEKEIDALVYQLYHLTDEEIKTIEDGQ

SEQ ID NO: 8224 - protein, 188 aa, Helicobacter pylori
  misc_feature (B) LOCATION 1...188
  hypothetical: YES
IDIEKYPATKAHLDAHYDTIATRCDQGDTPYHLRNCAYLEDFEKEKIVYGEIVQEPRFYLDNGECELGYFYAEATSFILTGEHLRYLLGMLHSKLITFAFKTFYAGGGLGESGYRYKKAFIERLPIPKITEKNQELADKITDCAEQILALKAKDPKANTQKLEKEIDALVYQLYHLTDEEIKTIEDGQ

SEQ ID NO: 8225 - protein, 187 aa, Helicobacter pylori
  misc_feature (B) LOCATION 1...187
  hypothetical: YES
DIEKYPATKAHLDAHYDTIATRCDQGDTPYHLRNCAYLEDFEKEKIVYGEIVQEPRFYLDNGECELGYFYAEATSFILTGEHLRYLLGMLHSKLITFAFKTFYAGGGLGESGYRYKKAFIERLPIPKITEKNQELADKITDCAEQILALKAKDPKANTQKLEKEIDALVYQLYHLTDEEIKTIEDGQ

SEQ ID NO: 8226 - protein, 174 aa, Helicobacter pylori
  misc_feature (B) LOCATION 1...174
  hypothetical: YES
MITTNKALFLDRDGIINIDRGYVSQKEDFEFQKGIFELLKHTKTLGYKLLLITNQSGINRGYYTLKDFEQLTEYLQESLLKELGFNLDGIYFCRHAPEENCACRKPKPSLILQAAKEHQICLERSFMIGDKESDMLAGLNAKVKNNLLLTQNPLKTPHSWIQCKNLKEMIDWIK

SEQ ID NO: 8227 - protein, 175 aa, Helicobacter pylori
  misc_feature (B) LOCATION 1...175
  hypothetical: YES
AFKKWEFYMKTLLMQVLCRSIWSCEGKSHLEEKLIDFFKTRDEGLLLPEQDLFVLVCQGRILEMPCKYNVHPRMVGTRMIPKKSDACMLHFYADEKPWKHFGYPYSKEWHQVAFKTSFESLVFENLVGKIETFTELNDHNKKSFFEFLNTRLNKKFLIQYVLFKIFKKLESFCLR

SEQ ID NO: 8228 - protein, 341 aa, Helicobacter pylori
  misc_feature (B) LOCATION 1...341
  hypothetical: YES
VSLYSMLLNAKRERDGVKLFYQIHCLVDSLSAENAEKLKRTISPFSAFSGIEFCDISKNGAYPFKLVSQLFLRLNPFAKKRFSKMILCRLLLASIFPQYEKIIMFDVDTLFVGDISEGFFTPMDGEYFGATKEDLSLIGIHSTNDLFVSRLNWSKGMGVKLNHKSLSFQEVGILYENPFNAGFMLVNLELWRESHLEEKLIDFFKTRDEGLLLPEQDLFVLVCQGRILEMPCKYNVHPRMVGTRMIPKKSDACMLHFYADEKPWKHFGYPYSKEWHQVAFKTSFESLVFENLVGKIETFTELNDHNKKSFFEFLNTRLNKKFLIQYVLFKIFKKLESFCLR

SEQ ID NO: 8229 - protein, 373 aa, Helicobacter pylori
  misc_feature (B) LOCATION 1...373
  hypothetical: YES
VKISASVTPPPPSFQTIPIVVAFDNNYCIPAGVSLYSMLLNAKRERDGVKLFYQIHCLVDSLSAENAEKLKRTISPFSAFSGIEFCDISKNGAYPFKLVSQLFLRLNPFAKKRFSKMILCRLLLASIFPQYEKIIMFDVDTLFVGDISEGFFTPMDGEYFGATKEDLSLIGIHSTNDLFVSRLNWSKGMGVKLNHKSLSFQEVGILYENPFNAGFMLVNLELWRESHLEEKLIDFFKTRDEGLLLPEQDLFVLVCQGRILEMPCKYNVHPRMVGTRMIPKKSDACMLHFYADEKPWKHFGYPYSKEWHQVAFKTSFESLVFENLVGKIETFTELNDHNKKSFFEFLNTRLNKKFLIQYVLFKIFKKLESFCLR

SEQ ID NO: 8230 - protein, 153 aa, Helicobacter pylori
  misc_feature (B) LOCATION 1...153
  hypothetical: YES
MQDELNAYQQEIEDTREVLKKIRLELKQVQEILRKKKSVLKGLKQEICQKKLEKENFRSNKETQNTEEDVIFPKALEEVEVYAKDNQVIMAKPCKRLFNEGLYLQYRSVLRENRLLKNHLSKKDFENSLLKIELRDLHKEIKLYQVQNLLKDK

SEQ ID NO: 8231 - protein, 155 aa, Helicobacter pylori
  misc_feature (B) LOCATION 1...155
  hypothetical: YES
KLMQDELNAYQQEIEDTREVLKKIRLELKQVQEILRKKKSVLKGLKQEICQKKLEKENFRSNKETQNTEEDVIFPKALEEVEVYAKDNQVIMAKPFKRLFNEGLYLQYRSVLRENRLLKNHLSKKDFENSLLKIELRDLHKEIKLYQVQNLLKDK

SEQ ID NO: 8232 - protein, 155 aa, Helicobacter pylori
  misc_feature (B) LOCATION 1...155
  hypothetical: YES
LNLPTPKSLRSREKQYKKLGLTNEQAKERTNELLKEIPNILQKGVKEEDRPGYAAIILNNSKVILSKFKGDNELKNHYMITSFEVDDKVLRELETIATLSNDYRDGINYSISNLNRENPTPKPLTSQEVLLKQQESLNEFTKEPTHLSPLTQMQA

SEQ ID NO: 8233 - protein, 175 aa, Helicobacter pylori
  misc_feature (B) LOCATION 1...175
  hypothetical: YES
TLTNLILPQTRLKRKSLYTPLNLPTPKSLRSREKQYKKLGLTNEQAKERTNELLKEIPNILQKGVKEEDRPGYAAIILNNSKVILSKFKGDNELKNHYMITSFEVDDKVLRELETIATLSNDYRDGINYSISNLNRENPTPKPLTSQEVLLKQQESLNEFTKEPTHLSPLTQMQA

SEQ ID NO: 8234 - protein, 243 aa, Helicobacter pylori
  misc_feature (B) LOCATION 1...243
  hypothetical: YES
MKANTIILVDWENFRRDIKQTKCVNYNIALDVIVTIRAFLLDDEWISRIYFYTTPPFDFEHALWDKRNDTLQNEKNPGTEMKIFTSSDIEEILQSSEATKWEKIYSDVENFQHDLASLDQVELRLGRTKLNAIRVEFDGSYRALLEQKQVDMLMGLDIQRIAFKKIADRILIFSKDTDLIPALKLARDEGLRVDIADLSNRLSLLSQDLKYNSDKVRKLSSNEVKDKLFSIRENLTKTNWALN

SEQ ID NO: 8235 - protein, 243 aa, Helicobacter pylori; identical to SEQ ID NO: 8234
  misc_feature (B) LOCATION 1...243
  hypothetical: YES

SEQ ID NO: 8236 - protein, 135 aa, Helicobacter pylori
  misc_feature (B) LOCATION 1...135
  hypothetical: YES
IRSRPMPARQSFKDLKDLILCDIGNTRIHFAQNYQLFSSAKEDLKRLGIQKEIFYISVNEENEKALLNCYPNAKNIAGFFHLETDYIGLGIDRQMACLAVVNGVIVDAGSAITIDLVKEGKHLGGCILPGLPNMS

SEQ ID NO: 8237 - protein, 223 aa, Helicobacter pylori
  misc_feature (B) LOCATION 1...223
  hypothetical: YES
MPARQSFKDLKDLILCDIGNTRIHFAQNYQLFSSAKEDLKRLGIQKEIFYISVNEENEKALLNCYPNAKNIAGFFHLETDYIGLGIDRQMACLAVVNGVIVDAGSAITIDLVKEGKHLGGCILPGLAQYVHAYKKSAKILEQPFKALDSLEVLPKNTRDAVNYGMILSIISCIQHLAKDQKIYLCGGDAKYLSAFLPHSVCKERLVFDGMEIALKKAGILECK

SEQ ID NO: 8238 - protein, 614 aa, Helicobacter pylori
  misc_feature (B) LOCATION 1...614
  hypothetical: YES
MSLERFAPIKVERCKDIQKELKKAAAENKLQTEDLWFEILKTSIFIKNSAKDDFSEAFGGELQQLEEEEYYEKKELTLYQTHDIKIKSNAYKRFFEVKVDEDLSKIEIILDECFIVLDTEEYYQEMFAYIKERLAFEGVVFRHFSQMYENLKTELRKYQKEAQNKRFILYASPTFIPNTEEKSHFLLEEEYLPTHTIFLSDQEESFVKENYYIAKENQKVACVNYPKQGRDGRNLKGLYIELSKVAHSPTPIGHDKNAFEEREENNALVYYSKALQGVKMEKGRLVSNQNFIFKNGIKSIETPNLLGGVESGLVLEIQAKDELSDAIDSNLILEASAINIKGNVGKNVILVAKEITIEGQIHPESYVYANKARITNHKGVCYAKEFECKYLERAKVYANSVKVEASAGSVVYAKEIALEKLKSDNKLYFSKQCWIDEVDGNGNRFIFYAFGGRENQEELKNAKQKLNALGVKSKKIIAQHQSLNHLVKNNQVIMEKLKNATEEIKRSLMQQESVKDAYSEFVFALKRLKILKAQMLELQKINNECYAKLISIENSFQHASITTKNPFKQENIVIYHRNYPKVSNLSAMLSHNESVDVIYEDHKIKKVPKSAIKG

SEQ ID NO: 8239 - protein, 615 aa, Helicobacter pylori
  misc_feature (B) LOCATION 1...615
  hypothetical: YES
KMSLERFAPIKVERCKDIQKELKKAAAGNKLQTEDLWFEILKTSIFIKNSAKDDFSEAFGGELQQLEEEEYYEKKELTLYQTHDIKIKSNAYKRFFEVKVDEDLSKIEIILDECFIVLDTEEYYQEMFAYIKERLAFEGVVFRHFSQMYENLKTELRKYQKEAQNKRFILYASPTFIPNTEEKSHFLLEEEYLPTHTIFLSDQEESFVKENYYIAKENQKVACVNYPKQGRDGRNLKGLYIELSKVAHSPTPIGHDKNAFEEREENNALVYYSKALQGVKMEKGRLVSNQNFIFKNGIKSIETPNLLGGVESGLVLEIQAKDELSDAIDSNLILEASAINIKGNVGKNVILVAKEITIEGQIHPESYVYANKARITNHKGVCYAKEFECKYLERAKVYANSVKVEASAGSVVYAKEIALEKLKSDNKLYFSKQCWIDEVDGNGNRFIFYAFGGRENQEELKNAKQKLNALGVKSKKIIAQHQSLNHLVKNNQVIMEKLKNATEEIKRSLMQQESVKDAYSEFVFALKRLKILKAQMLELQKINNECYAKLISIENSFQHASITTKNPFKQENIVIYHRNYPKVSNLSAMLSHNESVDVIYEDHKIKKVPKSAIKG

SEQ ID NO: 8240 - protein, 132 aa, Helicobacter pylori
  misc_feature (B) LOCATION 1...132
  hypothetical: YES
MRDFDFSFNHKACEGCGAKCCVGESGYIFVTIQEMQQISAFLKLELEEFSQKYVKKVGYKFSLLEKDAKDLGLACVFLDLETKKCQIYSARPKQCQTFPFWESVKTFSKEQKEAFCQSCPGITQKTKETKVR

SEQ ID NO: 8241 - protein, 143 aa, Helicobacter pylori
  misc_feature (B) LOCATION 1...143
  hypothetical: YES
VLISNRIKGGLMRDFDFSFNHKACEGCGAKCCVGESGYIFVTIQEMQQISAFLKLELEEFSQKYVKKVGYKFSLLEKDAKDLGLACVFLDLETKKCQIYSARPKQCQTFPFWESVKTFSKEQKEAFCQSCPGITQKTKETKVR

SEQ ID NO: 8242 - protein, 172 aa, Helicobacter pylori
  misc_feature (B) LOCATION 1...172
  hypothetical: YES
VFGLSLADMILERFKDFMREYPEPYKFLQVFYAQEKERFLNHKMNDYIKQNKSKEEASILARQGFVSVIGRALEKIIELLLKDFCIKNNVKMTNDKTLRAKRINGELDKVKRALLVHFGGYSVLPDIILYQTNKDNIKILAILSVKNSFRERFTKDALLEIKTFAIACNFSH

SEQ ID NO: 8243 - protein, 180 aa, Helicobacter pylori
  misc_feature (B) LOCATION 1...180
  hypothetical: YES
FDGFLWIEVFGLSLADMILERFKDFMREYPEPYKFLQVFYAQEKERFLNHKMNDYIKQNKSKEEASILARQGFVSVIGRALEKIIELLLKDFCIKNNVKMTNDKTLRAKRINGELDKVKRALLVHFGGYSVLPDIILYQTNKDNIKILAILSVKNSFRERFTKDALLEIKTFAIACNFSH

SEQ ID NO: 8244 - protein, 62 aa, Helicobacter pylori
  misc_feature (B) LOCATION 1...62
  hypothetical: YES
MLANSPAIFKWKRYFSSILCKGDKTSNNFTHSFLTFWLCFSWGKKRSFREMREGLILGGNLW

SEQ ID NO: 8245 - protein, 79 aa, Helicobacter pylori
  misc_feature (B) LOCATION 1...79
  hypothetical: YES
MKYALCLWAKYTLKILPMLANSPAIFKWKRYFSSILCKGDKTSNNFTHSFLTFWLCFSWGKKRSFREMREGLILGGNLW

SEQ ID NO: 8246 - protein, 154 aa, Helicobacter pylori
  misc_feature (B) LOCATION 1...154
  hypothetical: YES
KGELMHVLSVSEINAQIKALLEATFLQVRVQGEVSNLTIHKVSGHAYFSLKDSQSVIRCVLFKGNANRLKFALKEGQEMVVFGGISVYAPRGDYQINCFEIEPKEIGSLTLALEQLKEKLRLKGYFDEANKLPKPNFPKRVAVITSQNSAAWAA

SEQ ID NO: 8247 - protein, 285 aa, Helicobacter pylori
  misc_feature (B) LOCATION 1...285
  hypothetical: YES
TSGSHHFSKFSRLGGMKKIASKRWPMCELVCINTLMQGEGCVQSVVESIAYADSFYDTKNAFDAIVVARGGGSMEDLYSFNDEKIADALYLAKTFSMSAIGHESDFLLSDSVADLRASTPSNAMEILLPSSDEWLQRLDGFNVKLHRSFKTLLHQKKAHLEHLAASLKRLSFENKHHLNALKLEKLTIALDNKTLEFLRLKKTLLEKISTQLSTSPFLQTKTERLNRLENALKLAYANLKLPQFGALVSKNHQAIELEALKRGDKIELSNEKARASAEILSVDRV

SEQ ID NO: 8248 - protein, 421 aa, Helicobacter pylori
  misc_feature (B) LOCATION 1...421
  hypothetical: YES
LMHVLSVSEINAQIKALLEATFLQVRVQGEVSNLTIHKVSGHAYFSLKDSQSVIRCVLFKGNANRLKFALKEGQEMVVFGGISVYAPRGDYQINCFEIEPKEIGSLTLALEQLKEKLRLKGYFDEANKLPKPNFPKRVAVITSQNSAAWADMKKIASKRWPMCELVCINTLMQGEGCVQSVVESIAYADSFYDTKNAFDAIVVARGGGSMEDLYSFNDEKIADALYLAKTFSMSAIGHESDFLLSDSVADLRASTPSNAMEILLPSSDEWLQRLDGFNVKLHRSFKTLLHQKKAHLEHLAASLKRLSFENKHHLNALKLEKLTIALDNKTLEFLRLKKTLLEKISTQLSTSPFLQTKTERLNRLENALKLAYANLKLPQFGALVSKNHQAIELEALKRGDKIELSNEKARASAEILSVDRV

SEQ ID NO: 8249 - protein, 86 aa, Helicobacter pylori
  misc_feature (B) LOCATION 1...86
  hypothetical: YES
RSKQEAQKQAALAKGEADANRIKAQGVADAIVIEAKAKSQANLSISQSLSDKLLRLRQIEVQGQFNEALKTNKQRSNHAHSRRSCA

SEQ ID NO: 8250 - protein, 85 aa, Helicobacter pylori
  misc_feature (B) LOCATION 1...85
  hypothetical: YES
SKQEAQKQAALAKGEADANRIKAQGVADAIVIEAKAKSQANLSISQSLSDKLLRLRQIEVQGQFNEALKTNKQRSNHAHSRRSCA

SEQ ID NO: 8251 - protein, 230 aa, Helicobacter pylori
  misc_feature (B) LOCATION 1...230
  hypothetical: YES
MDSRGLTVSIELTVQYRLNPQTTPQTIANYGLSWEQKIINPVVRDVVRSVVGRYPGEDLPIKRNEIAALINSGINKEVCKLPNTPVELSSIQLREIVLPAKIKEQIEKVQIARQESERVKYEVERSKQEAQKQAALAKGEADANRIKAQGVADAIVIEAKAKSQANLSISQSLSDKLLRLRQIEVQGQFNEALKTNNNAQIMLTPGGAVPNIWIDTKSKVKSSIAESKEP

SEQ ID NO: 8252 - protein, 362 aa, Helicobacter pylori
  misc_feature (B) LOCATION 1...362
  hypothetical: YES
MPIDLNEHLKKKNSQRENPTPNTPNNGGRFIPPSNSFNSKKLSVLIVIVLLGVIAFLAKPFEVISSGEIGIKITAGKYEPTPLQPGIHFFVPIIQDILIVDTRIRNINFSRTEDMGVAGKNQGIFRNDAINVMDSRGLTVSIELTVQYRLNPQTTPQTIATYGLSWEQKIINPVVRDVVRSVVGRYPAEDLPIKRNEIAALINSGINKEVSKLPNTPVELSSIQLREIVLPAKIKEQIEKVQIARQESERVKYEVERSKQEAQKQAALAKGEADANRIKAQGVADAIVIEAKAKSQANLSISQSLSDKLLRLRQIEVQGQFNEALKTNNNAQIMLTPGGAVPNIWIDTKSKVKSSIAESKEP

SEQ ID NO: 8253 - protein, 199 aa, Helicobacter pylori
  misc_feature (B) LOCATION 1...199
  hypothetical: YES
LYNRAAGTQSSSMNFVSNSANIQAQNSYFIDDTAQNKGNPNFSFNALNLDFSNSSFRGYVGQTQSVFKFNAVNAISFTNSSNLSSGLYQMQAKSVLFDNSNLSVSVGTSSIKANAINLSQNASINASNHSTLELQGDLNLNDTSSLNLNQSAINVSNNATINDYASLIASNGSHLNFNGAVNFNSANITTSLNNSSIVF

SEQ ID NO: 8254 - protein, 219 aa, Helicobacter pylori
  misc_feature (B) LOCATION 1...219
  hypothetical: YES
RWGASLNFNGLQGILLTNATLYNRAAGTQSSSMNFVSNSANIQAQNSYFIDDTAQNKGNPNFSFNALNLDFSNSSFRGYVGQTQSVFKFNAVNAISFTNSSNLSSGLYQMQAKSVLFDNSNLSVSVGTSSIKANAINLSQNASINASNHSTLELQGDLNLNDTSSLNLNQSAINVSNNATINDYASLIASNGSHLNFNGAVNFNSANITTSLNNSSIVF

SEQ ID NO: 8255 - protein, 230 aa, Helicobacter pylori
  misc_feature (B) LOCATION 1...230
  hypothetical: YES
RWGASLNFNGLQGILLTNATLYNRAAGTQSSSMNFVSNSANIQAQNSYFIDDTAQNKGNPNFSFNALNLDFSNSSFRGYVGQTQSVFKFNAVNAISFTNSSNLSSGLYQMQAKSVLFDNSNLSVSVGTSSIKANAINLSQNASINASNHSTLELQGDLNLNDTSSLNLNQSAINVSNNATINDYASLIASNGSHLNFNGAVNFNSANITTSLSSSSIVFKGRSLYEGSLI

SEQ ID NO: 8256 - protein, 158 aa, Helicobacter pylori
  misc_feature (B) LOCATION 1...158
  hypothetical: YES
LKQAIILTEFNQRARYAIFKSIFRIFGLDTKRSSSDEFLEIKQVSFQSKTWSATFNDTTLEKAKVFCDIKTTLAVGVWNNISNLLFIVYGKHPEIGLYLEQKVKECHNESRRSTQTIGISKLIKEFEFKIKPIDSKEQELINLFNLKFGRFSWENYLA

SEQ ID NO: 8257 - protein, 191 aa, Helicobacter pylori
  misc_feature (B) LOCATION 1...191
  hypothetical: YES
NALKSYPPNSIQTPQSIEIHQIIIQKLFYNGWRLKQAIILTEFNQRARYAIFKSIFRIFGLDTKRSSSDEFLEIKQVSFQSKTWSATFNDTTLEKAKVFCDIKTTLAVGVWNNISNLLFIVYGKHPEIGLYLEQKVKECHNESRRSTQTIGISKLIKEFEFKIKPIDSKEQELINLFNLKFGRFSWENYLA

SEQ ID NO: 8258 - protein, 142 aa, Helicobacter pylori
  misc_feature (B) LOCATION 1...142
  hypothetical: YES
MKKFASVLVQLKTLALEKIERKLESKRLELQQNEREVLDKQAQLSAFKNPELGGMSLFLQTQQLKSALRMEIEYYQQEGENLTKDLKILEKDYLLANQELEKAKIILEKEKQKEKEILEKKEQALLDENAMILHWQKGGLHA

SEQ ID NO: 8259 - protein, 501 aa, Helicobacter pylori
  misc_feature (B) LOCATION 1...501
  hypothetical: YES
MKMILFNQNPMIEKLLESVSKKLELSIENFNHYQELSARLKGDPEWLLIADDECLEKLDQVDWLELKETISQNKNSVCMYKKGNEAQPFLEGFEMKIKKPFLPTEMLKVLQKKLGSNASELEPSQNLDPTQEILETNWDELENLGDLEALAKEEPNNEEQLLPTLNEQEGETPKEEAQEEVKKEEVKEMQEEVKEKQKQEVAENPQDEEKPKDDETQGSVEPPKDEEVSKELETQEELETPKEETQEQEPIKEETQEIKEEKQEKTQDSPSAQELEAMQELVKEIQENSNDQENKKETQETQENTETPQDIETQELEIPKEEETQEVAEKTQVQGLEKEEIAETPQEKEIQETQDETPQELEAQDEKLQENETPKDESMQESAQNLQDKETPQEETQEDHYESIEDIPEPVMAKAMGEELPFLNEAVAKIPNNENDTETPKESDIKAPQEKEESDKTSSPLELRLNLQDLLKSLNQESLKSLLENKTLSIKITLEDKKPNE

SEQ ID NO: 8260 - protein, 505 aa, Helicobacter pylori
  misc_feature (B) LOCATION 1...505
  hypothetical: YES
GVPKMKMILFNQNPMIEKLLESVSKKLELSIENFNHYQELSARLKGDPEWLLIADDECLEKLDQVDWLELKETISQNKNSVCMYKKGNEAQPFLEGFEMKIKKPFLPTEMLKVLQKKLGSNASELEPSQNLDPTQEILETNWDELENLGDLEALAKEEPNNEEQLLPTLNEQEGETPKEEAQEEVKKEEVKEMQEEVKEKQKQEVAENPQDEEKPKDDETQGSVEPPKDEEVSKELETQEELETPKEETQEQEPIKEETQEIKEEKQEKTQDSPSAQELEAMQELVKEIQENSNDQENKKETQETQENTETPQDIETQELEIPKEEETQEVAEKTQVQGLEKEEIAETPQEKEIQETQDETPQELEAQDEKLQENETPKDESMQESAQNLQDKETPQEETQEDHYESIEDIPEPVMAKAMGEELPFLNEAVAKIPNNENDTETPKESDIKAPQEKEESDKTSSPLELRLNLQDLLKSLNQESLKSLLENKTLSIKITLEDKKPNE

SEQ ID NO: 8261 - protein, 58 aa, Helicobacter pylori
  misc_feature (B) LOCATION 1...58
  hypothetical: YES
MVRAPTKWHERSLNLFSSRSHYALSINKFQYNTRSFYNLSCVKDQNARVCLLFRGFCI

SEQ ID NO: 8262 - protein, 80 aa, Helicobacter pylori
  misc_feature (B) LOCATION 1...80
  hypothetical: YES
MKLVLAKNTRKSDAKSVELEDLYKKFNEDKRSIFYFAPTNAHKDMLKAVDFFKEKGHTAYLDEVRVSTDEKDFLYELHII

SEQ ID NO: 8263 - protein, 85 aa, Helicobacter pylori
  misc_feature (B) LOCATION 1...85
  hypothetical: YES
IKGNGMKLVLAKNTRKSDAKSVELEDLYKKFNEDKRSIFYFAPTNAHKDMLKAVDFFKEKGHTAYLDEVRVSTDEKDFLYELHII

SEQ ID NO: 8264 - protein, 69 aa, Helicobacter pylori
  misc_feature (B) LOCATION 1...69
  hypothetical: YES
LQSPVTSHIKVFMITPDNDEEISFKDKPKKARIVMEHELEGLYLAKSHFDQSSKIKGIENLLEDLKRLL

SEQ ID NO: 8265 - protein, 87 aa, Helicobacter pylori
  misc_feature (B) LOCATION 1...87
  hypothetical: YES
KIRLESVSQKTPYWKLKLLQSPVTSHIKVFMITPDNDEEISFKDKPKKARIVMEHELEGLYLAKSHFDQSSKIKGIENLLEDLKRLL

SEQ ID NO: 8266 - protein, 70 aa, Helicobacter pylori
  misc_feature (B) LOCATION 1...70
  hypothetical: YES
KRQGTQKSELKRVGLLNQILAFYGLKIGDWQGAKSVLCDKKGQSVIVNDLGDLWDKAQICQKKMDVLDLL

SEQ ID NO: 8267 - protein, 128 aa, Helicobacter pylori
  misc_feature (B) LOCATION 1...128
  hypothetical: YES
LIWEIKMCVLCGELISSFHWTDGSDGYRSDENLRGSNAVISANENARERKRARLKRVGLLNQILAFYGLKIGDWQGAKFVLCDKKGQSVIVNDLGDLWDKAQNLAKKKMDVLDSNLLAFLNQHTQATR

SEQ ID NO: 8268 - protein, 56 aa, Helicobacter pylori
  misc_feature (B) LOCATION 1...56
  hypothetical: YES
KQYLKTHRLGELLQASAPYAIAPVELIVVFYKNEYKRKKQTSTMSREEFLLYTNGL

SEQ ID NO: 8269 - protein, 76 aa, Helicobacter pylori
  misc_feature (B) LOCATION 1...76
  hypothetical: YES
NFSGESKKRLKHPAPFPRELPRRCIQLFSFLEDTIFDPFSGSGTTILEANALGRFSVGLEIEKEYCELFKKRILES

SEQ ID NO: 8270 - protein, 75 aa, Helicobacter pylori
  misc_feature (B) LOCATION 1...75
  hypothetical: YES
NFSGESKKRLKHPAPFPRELPRRCIQLFSFLEDTIFDPFSGSGTTILEANALGRFSVGLEIEKEYCELFKKRILE

SEQ ID NO: 8271 - protein, 129 aa, Helicobacter pylori
  misc_feature (B) LOCATION 1...129
  hypothetical: YES
LGELLQASAPYAIAPVELIVVFYKNEYKRKKQTSTMSREEFLLYTNGLWNFSGESKKRLKHPAPFPRELPRRCIQLFSFLEDTIFDPFSGSGTTILEANALGRFSVGLEIEKEYCELSKKRILESLSLV

SEQ ID NO: 8272 - protein, 140 aa, Helicobacter pylori
  misc_feature (B) LOCATION 1...140
  hypothetical: YES
MKPYFSLEKLDLYHGDASVLETFEKGFYDLCVTSPPYNLSIEYQGSNDFRAYDDYLNWCKNWLKNCYFWGKEQARLCLNVPLDTNKHGKQSLGADITIVAKECGWKYQNTIIWNESNISRRTAWGSCCKLAHLMRSLLWS

SEQ ID NO: 8273 - protein, 153 aa, Helicobacter pylori
  misc_feature (B) LOCATION 1...153
  hypothetical: YES
GHREFVRRFKKAFMKPYFSLEKLDLYHGDASVLETFEKGFYDLCVTSPPYNLSIEYQGSNDFRAYDDYLNWCKNWLKNCYFWGKEQARLCLNVPLDTNKHGKQSLGADITIVAKECGWKYQNTIIWNESNISRRTAWGSCCKLAHLMRSLLWS

SEQ ID NO: 8274 - protein, 252 aa, Helicobacter pylori
  misc_feature (B) LOCATION 1...252
  hypothetical: YES
MKPYFSLEKLDLYHGDASVLETFEKGFYDLCVTSPPYNLSIEYQGSNDFRAYDDYLNWCKNWLKNCYFWGKEQARLCLNVPLDTNKHGKQSLGADITIVAKECGWKYQNTIIWNESNISRRTAWGSWLQASAPYAIAPVELIVVFYKNEYKRKKQTSTMSREEFLLYTNGLWNFSGESKKRLKHPAPFPRELPRRCIQLFSFLEDTIFDPFSGSGTTILEANALGRFSVGLEIEKEYCELSKKRILESLSLV

SEQ ID NO: 8275 - protein, 158 aa, Helicobacter pylori
  misc_feature (B) LOCATION 1...158
  hypothetical: YES
KRACLSYEMLGKSLSYNPYLPRIIPQTKDCVFATPDEVLETLLKENTRTDCVIVNFKGLYEIGAPSVFDLEILGLLRRHASSLIVHQDPFISHYQLLESLVQGSDGVILDEELLKEDLKGMVEFAWRLGLSVFVETHKPDYTHLKDLGVLGVLENSPH

SEQ ID NO: 8276 - protein, 166 aa, Helicobacter pylori
  misc_feature (B) LOCATION 1...166
  hypothetical: YES
MLSYEMLGKSLSYNPYLPRIIPQTKDCVFATPDEVLETLLKENTRTDCVIVNFKGLYEIGAPSVFDLEILGLLRRHASSLIVHQDPFISHYQLLESLVQGSDGVILDEELLKEDLKGMVEFAWRLGLSVFVETHKPDYTHLKDLGVLGVLENSPHSYNQKKIVFLD

SEQ ID NO: 8277 - protein, 409 aa, Helicobacter pylori
  misc_feature (B) LOCATION 1...409
  hypothetical: YES
MQEIIGASLVFLCNEKCEVLEDYGVVFDEKIVEIGDYHNLTLKYPHLKAQFFENSVLLPAFINAHTHFEFSNNKASFDYGSFSGWLGSVLNNGGAILENCQGAIQNAIMAQLKSGVGSVGAISNHLIEVNLLKESPLNAVVFLEFLGSSYSLEKLKAFEAKFKELKDLEDQKLKAALAVHAPYSVQKDMALSVIQLAKDSQSLLSTHFLESLEELEWVENSKGWFENFYQRFLKESNFTSLYEGANDYIDMFKDTHTLFVHNQFASLEALKRIKSQVKNAFLITCPFSNRLLSGKALDLERVREAGLSVSVATDGLSSNISLSLLDELRAFLLSHNMPLLELAKIALLGATRHGAKALALNNGEIETNKRADLSVFGFNEKFTKEQAILQFLLHAKEVERLFLGGKRVI

SEQ ID NO: 8278 - protein, 412 aa, Helicobacter pylori
  misc_feature (B) LOCATION 1...412
  hypothetical: YES
GECMQEIIGASLVFLCNEKCEVLEDYGVVFDEKIVEIGDYHNLTLKYPHLKAQFFENSVLLPAFINAHTHFEFSNNKASFDYGSFSGWLGSVLNNGGAILENCQGAIQNAIMAQLKSGVGSVGAISNHLIEVNLLKESPLNAVVFLEFLGSSYSLEKLKAFEAKFKELKDLEDQKLKAALAVHAPYSVQKDMALSVIQLAKDSQSLLSTHFLESLEELEWVENSKGWFENFYQRFLKESNFTSLYEGANDYIDMFKDTHTLFVHNQFASLEALKRIKSQVKNAFLITCPFSNRLLSGKALDLERVREAGLSVSVATDGLSSNISLSLLDELRAFLLSHNMPLLELAKIALLGATRHGAKALALNNGEIETNKRADLSVFGFNEKFTKEQAILQFLLHAKEVERLFLGGKRVI

SEQ ID NO: 8279 - protein, 251 aa, Helicobacter pylori
  misc_feature (B) LOCATION 1...251
  hypothetical: YES
LLNRIIEHMNAHHVEDMKGLLKKFGQVHHAENVAFKSVDPQGIVIGYNNNQTLRIEFNHEVKDPKDYKNAIIELCQSVEKTHDLKGVEEEVKAFRKDFDSVCLATLHPNGHVVCSYAPLMTDGKQYYIYVSEVAEHFAGLKNNPHNVEVMFLEDESKAKSAILRKRLRYKTNARFIERGAEFDKAFDSFIEKTGGAGGIKTIRTMQDFHLIALDFKEGRFVKGFGQAYDILGDKIAYVGDKGNPHNFAHKK

SEQ ID NO: 8280 - protein, 279 aa, Helicobacter pylori
  misc_feature (B) LOCATION 1...279
  hypothetical: YES
SKAIKRLSSKLVFLIIIFSLFLKNKENILLNRIIEHMNAHHVEDMKGLLKKFGQVHHAENVAFKSVDPQGIVIGYNNNQTLRIEFNHEVKDPKDYKNAIIELCQSVEKTHDLKGVEEEVKAFRKDFDSVCLATLHPNGHVVCSYAPLMTDGKQYYIYVSEVAEHFAGLKNNPHNVEVMFLEDESKAKSAILRKRLRYKTNARFIERGAEFDKAFDSFIEKTGGAGGIKTIRTMQDFHLIALDFKEGRFVKGFGQAYDILGDKIAYVGDKGNPHNFAHKK

SEQ ID NO: 8281 - protein, 96 aa, Helicobacter pylori
  misc_feature (B) LOCATION 1...96
  hypothetical: YES
FLKRHMEWSAFGIWLSLLLHQYGTQILRIKGIIDIGSDLLVSINGVMHVIYPPKHILKDQNGSNLVFIVRHLGREKILNSLKGFKDFLGIKGFETP

SEQ ID NO: 8282 - protein, 170 aa, Helicobacter pylori
  misc_feature (B) LOCATION 1...170
  hypothetical: YES
SVSVFKSTYTSHSLLPKIPITLITGFLGSGKTSFLSEYLNQIDHQGVALIINEIGQAALDQRILSVQYCGEKMLYLNAGCVCCNKRLDLVESLKATLNNYEWRGEILKRVIIETTGLANPAPILWTNLSDVFLGAHFEIQSVVACVDVLNAKTHLTNNEAKEQIVFADSV

SEQ ID NO: 8283 - protein, 169 aa, Helicobacter pylori
  misc_feature (B) LOCATION 1...169
  hypothetical: YES
SVSVFKSTYTSHSLLPKIPITLITGFLGSGKTSFLSEYLNQIDHQGVALIINEIGQAALDQRILSVQYCGEKMLYLNAGCVCCNKRLDLVESLKATLNNYEWRGEILKRVIIETTGLANPAPILWTNLSDVFLGAHFEIQSVVACVDVLNAKTHLTNNEAKEQIVFADS

SEQ ID NO: 8284 - protein, 321 aa, Helicobacter pylori
  misc_feature (B) LOCATION 1...321
  hypothetical: YES
MPKIPITLITGFLGSGKTSFLSEYLNQIDHQGVALIINEIGQAALDQRILSVQYCGEKMLYLNAGCVCCNKRLDLVESLKATLNNYEWRGEILKRVIIETTGLANPAPILWTNLSDVFLGAHFEIQSVVACVDVLNAKTHLTNNEAKEQIVFADSVLLTKTDLQNDSTALMKLKERIQSLNPSAEIFDKKNIDYESFFSRKNGARNFMLRMPKDSHSQGFETLSVSFEGTMEWSAFGIWLSLLLHQYGTQILRIKGIIDIGSDLLVSINGVMHVIYPPKHILKDQNGSNLVFIVRHLGREKILNSLKGFKDFLGIKGFETP

SEQ ID NO: 8285 - protein, 437 aa, Helicobacter pylori
  misc_feature (B) LOCATION 1...437
  hypothetical: YES
LKVYIETMGCAMNSRDSEHLLSELSKLDYKETSDPKMADLILINTCSVREKPERKLFSEIGQFAKIKKPNAKIGVCGCTASHMGADILKKAPSVSFVLGARNVSKISQVIHKEKAVEVAIDYDESAYAFEFFEKKAQIRSLLNISIGCDKKCAYCIVPHTRGKEISIPMDLILKEAEKLANNGTKELMLLGQNVNNYGVRFSSEHAKVGFSDLLDKLSEIQGIERIRFTSPHPLHMNDAFLERFAQNPKVCKSIHMPLQSGSSAVLKMMRRGYSKEWFLNRVERLKALVPEVGISTDIIVGFPNESDKDFEDTMEVLEKVRFDTLYSFIYSPRPFTEAGAWKERVPLEISSLRLERLQNRHKEILEEKAKLEVGKTHVVLVENRREMDGQIVGFEGRSDTGKFIEVTCKEKKNPGELVRVEIISHSKGRLMATTKGN

SEQ ID NO: 8286 - protein, 440 aa, Helicobacter pylori
  misc_feature (B) LOCATION 1...440
  hypothetical: YES
RLVLKVYIETMGCAMNSRDSEHLLSELSKLDYKETSDPKMADLILINTCSVREKPERKLFSEIGQFAKIKKPNAKIGVCGCTASHMGADILKKAPSVSFVLGARNVSKISQVIHKEKAVEVAIDYDESAYAFEFFEKKAQIRSLLNISIGCDKKCAYCIVPHTRGKEISIPMDLILKEAEKLANNGTKELMLLGQNVNNYGVRFSSEHAKVGFSDLLDKLSEIQGIERIRFTSPHPLHMNDAFLERFAQNPKVCKSIHMPLQSGSSAVLKMMRRGYSKEWFLNRVERLKALVPEVGISTDIIVGFPNESDKDFEDTMEVLEKVRFDTLYSFIYSPRPFTEAGAWKERVPLEISSLRLERLQNRHKEILEEKAKLEVGKTHVVLVENRREMDGQIVGFEGRSDTGKFIEVTCKEKKNPGELVRVEIISHSKGRLMATTKGN

SEQ ID NO: 8287 - protein, 150 aa, Helicobacter pylori
  misc_feature (B) LOCATION 1...150
  hypothetical: YES
MKPLHFSHLDREQSGDVGFIIKNLIFLGVFSLLGWLNTEYFLWPSMLELKKILLEENRKKSVLEYAQRHFETALANYRNQKETSESLLKIFNDEESRRILEKILKKCFDAYKIKPLLSQNPSQKTQFFIMARASELEKTYLFFTLINKYL

SEQ ID NO: 8288 - protein, 179 aa, Helicobacter pylori
  misc_feature (B) LOCATION 1...179
  hypothetical: YES
MKPLHFSHLDREQSGDVGFIIKNLIFLGVFSLLGWLNTEYFLWPSMLELKKILLEENRKKSVLEYAQRHFETALANYRNQKETSESLLKIFNDEESRRILEKILKKCFDAYKIKPLLSQNPSQKTQFFIMARASELEKTYLFFTLINKYLPSAQSQLPLKISKDSDGLLVQFGVSIDLQ

SEQ ID NO: 8289 - protein, 179 aa, Helicobacter pylori; identical to SEQ ID NO: 8288
  misc_feature (B) LOCATION 1...179
  hypothetical: YES

SEQ ID NO: 8290 - protein, 117 aa, Helicobacter pylori
  misc_feature (B) LOCATION 1...117
  hypothetical: YES
MRKSDPLNTPFSQAECKDYSYCVATFLEKYLKKVVSFPQALSVEYTLLEDKVKQITIYTHPSDMGHVIGKEGKMVSAIKAFVSGVKAKDGFSYKIVVFASNDKNGDKNPHALGDQTP

SEQ ID NO: 8291 - protein, 117 aa, Helicobacter pylori; identical to SEQ ID NO: 8290
  misc_feature (B) LOCATION 1...117
  hypothetical: YES

SEQ ID NO: 8292 - protein, 117 aa, Helicobacter pylori
  misc_feature (B) LOCATION 1...117
  hypothetical: YES
MRKSDPLNTPFSQAECKDYSYCVATFLEKYLKKVVSFPQALSVEYTLLEDKVKQITIYTHPSDMGHVIGKEGKMVSAIKAFVSGVKAKDGVSYKIVVFASNDKNGDKNPHALGDQTP

SEQ ID NO: 8293 - protein, 285 aa, Helicobacter pylori
  misc_feature (B) LOCATION 1...285
  hypothetical: YES
MFRSPCYTQPLCVAKFLFFRKNMGKTETTIFVDWENLLADLKAIQETDERLKESNFNFNNPEQLLALIRSFLEPEEELKRIYFYVSEPFTEVEPRIKSNKKEELEEYKEKNPKEYEEKVNKSGIIQSFNHAIAQQNQVKLRVGRVRFMFKDMPKDQRVHGGLEAEILIPHLELRQKQIDALLAHDITKLYCTKPLGCVVLFSKDTDFVPVLEAAWEKGFEVFIANIQESPNSVPSDLKKSCNVRERNVAEIVDNLPKNQYTPKKKNFSPNEPFNNPFKDQLFKKN

SEQ ID NO: 8294 - protein, 295 aa, Helicobacter pylori
  misc_feature (B) LOCATION 1...295
  hypothetical: YES
QDFYFFKKQGMFRSPCYTQPLCVAKFLFFRKNMGKTETTIFVDWENLLADLKAIQETDERLKESNFNFNNPEQLLALIRSFLEPEEELKRIYFYVSEPFTEVEPRIKSNKKEELEEYKEKNPKEYEEKVNKSGIIQSFNHAIAQQNQVKLRVGRVRFMFKDMPKDQRVHGGLEAEILIPHLELRQKQIDALLAHDITKLYCTKPLGCVVLFSKDTDFVPVLEAAWEKGFEVFIANIQESPNSVPSDLKKSCNVRERNVAEIVDNLPKNQYTPKKKNFSPNEPFNNPFKDQLFKKN

SEQ ID NO: 8295 - protein, 125 aa, Helicobacter pylori
  misc_feature (B) LOCATION 1...125
  hypothetical: YES
GFEHINEVRLEKIDSLFSRLMGQTNSPMALDMVLVNPYCLREYSFVIPKYIELLLELDSHSKVEVYCVVVLQKNLEDSMVNFLAPLVFNSKNGFGAQVALSMMDYPDFGFRDPLKSFVVKERERA

SEQ ID NO: 8296 - protein, 135 aa, Helicobacter pylori
  misc_feature (B) LOCATION 1...135
  hypothetical: YES
VNYFLKAPILGFEHINEVRLEKIDSLFSRLMGQTNSPMALDMVLVNPYCLREYSFVIPKYIELLLELDSHSKVEVYCVVVLQKNLEDSMVNFLAPLVFNSKNGFGAQVALSMMDYPDFGFRDPLKSFVVKERERA

SEQ ID NO: 8297 - protein, 178 aa, Helicobacter pylori
  misc_feature (B) LOCATION 1...178
  hypothetical: YES
LGKNGKSVGLNGGLKLHLESDFPECLKKGVKVSVAPINAFSCASSFKDYVIHSYEHAKNLLFLETIRTPEKAKELTNLGLFMSEAESKKLCVLKEGEFFYCDLIGLSVVEGNEILGKVIEIQRISQTDYFMVETTRSLVEKGLAKIFLIPYRDFYIQEILLQDKKITTHNAKTLLENS

SEQ ID NO: 8298 - protein, 181 aa, Helicobacter pylori
  misc_feature (B) LOCATION 1...181
  hypothetical: YES
MLLVGRIGKSVGLNGGLKLHLESDFPECLKKGVKVSVAPINAFSCASSFKDYVIHSYEHAKNLLFLETIRTPEKAKELTNLGLFMSEAESKKLCVLKEGEFFYCDLIGLSVVEGNEILGKVIEIQRISQTDYFMVETTRSLVEKGLAKIFLIPYRDFYIQEILLQDKKITTHNAKTLLENS

SEQ ID NO: 8299 - protein, 95 aa, Helicobacter pylori
  misc_feature (B) LOCATION 1...95
  hypothetical: YES
MPNTTNKDYTKYSQKQLFNFLNSIKAKQKRALEKLKEIQTQKQRIKKALQFKALHLTENGYTIEEEREILARAKDTKNRLCFKSIEDFKKHCENL

SEQ ID NO: 8300 - protein, 119 aa, Helicobacter pylori
  misc_feature (B) LOCATION 1...119
  hypothetical: YES
FSSLFNTALSLAHNESVFLKKGISMPNTTNKDYTKYSQKQLFNFLNSIKAKQKRALEKLKEIQTQKQRIKKALQFKALHLTENGYTIEEEREILARAKDTKNRLCFKSIEDFKKHCENL

SEQ ID NO: 8301 - protein, 83 aa, Helicobacter pylori
  misc_feature (B) LOCATION 1...83
  hypothetical: YES
MPNTTNKDYTKYSQKQLFNLINQLEQKISQAFDDKRGCCLGHEIPNLETQQAIRGALNGENLEVIEDFSAWANEIKKEVNAEN

SEQ ID NO: 8302 - protein, 93 aa, Helicobacter pylori
  misc_feature (B) LOCATION 1...93
  hypothetical: YES
TYLNLIKGMNMPNTTNKDYTKYSQKQLFNLINQLEQKISQAFDDKRGCCLGHEIPNLETQQAIRGALNGENLEVIEDFSAWANEIKKEVNAEN

SEQ ID NO: 8303 - protein, 52 aa, Helicobacter pylori
  misc_feature (B) LOCATION 1...52
  hypothetical: YES
LQVNNMTKRAKLKTKLKNVKQKSGLNQSILNASFYQIISFLDCKQQHNSDKQ

SEQ ID NO: 8304 - protein, 442 aa, Helicobacter pylori
  misc_feature (B) LOCATION 1...442
  hypothetical: YES
MKVNKGFKFRLYPTKEQQDKLQHCFFVYNQAYNIGLNLLQEQYEKNKDLPPKERTRKKSSELDKAIKHHLNARGLSFSSVIAQQSRMNVERALKDAFKVKNRGFPKFKNSKSAKQSFSWNNQGFFIKESDEERFKIFTLMKMPLMMCMHRDFPPHSKVKQIVISCSHRKYFVSFSVEYEQDITPIKNPKNGVGLDLNILDIACSCGVNNHKKLTDFKRYSTDMKELLGIEIDEELDTKRLIPTYSKLYSLKKHSKKFKRLQRKQSRRVLKSKQNKTKLGGNFYKTQKKLNQVFDKSSHQKTDRYHKITSELSKQFELIVVEDLQVKNMTKRAKLKNVKQKSGLNQSILNTSFYQIISFLDYKQQHNGKLLVKVPPQYTSKTCHCCGNINHKLKLNHRQYWCLECGYREHRDINAANNILSKGLSLFGVGNIHADFKEQSLSC

SEQ ID NO: 8305 - protein, 445 aa, Helicobacter pylori
  misc_feature (B) LOCATION 1...445
  hypothetical: YES
NPFMKVNKGFKFRLYPTKEQQDKLQHCFFVYNQAYNIGLNLLQEQYEKNKDLPPKERTRKKSSELDKAIKHHLNARGLSFSSVIAQQSRMNVERALKDAFKVKNRGFPKFKNSKSAKQSFSWNNQGFFIKESDEERFKIFTLMKMPLMMCMHRDFPPHSKVKQIVISCSHRKYFVSFSVEYEQDITPIKNPKNGVGLDLNILDIACSCGVNNHKKLTDFKRYSTDMKELLGIEIDEELDTKRLIPTYSKLYSLKKHSKKFKRLQRKQSRRVLKSKQNKTKLGGNFYKTQKKLNQVFDKSSHQKTDRYHKITSELSKQFELIVVEDLQVKNMTKRAKLKNVKQKSGLNQSILNTSFYQIISFLDYKQQHNGKLLVKVPPQYTSKTCHCCGNINHKLKLNHRQYWCLECGYREHRDINAANNILSKGLSLFGVGNIHADFKEQSLSC

SEQ ID NO: 8306 - protein, 174 aa, Helicobacter pylori
  misc_feature (B) LOCATION 1...174
  hypothetical: YES
MPQIQSSHSNHFDFTIDTADRTKLLMSYLVVPTTANFNNVMHGGELLNLLDKVAYVCSTRYCAKGTVTLSVDGVTFKYPIPVGNLLTFLASINYVGNTSCEVGIKVLSEDIKTREITHTNSCYFTMVAVENGKPTPMPKYEPKTEVEIRRYEGALKRKEMRTRGYLKSGKHEGV

SEQ ID NO: 8307 - protein, 177 aa, Helicobacter pylori
  misc_feature (B) LOCATION 1...177
  hypothetical: YES
GEAMPQIQSSHSNHFDFTIDTADRTKLLMSYLVVPTTANFNNVMHGGELLNLLDKVAYVCSTRYCAKGTVTLSVDGVTFKYPIPVGNLLTFLASINYVGNTSCEVGIKVLSEDIKTREITHTNSCYFTMVAVENGKPTPMPKYEPKTEVEIRRYEGALKRKEMRTRGYLKSGKHEGV

SEQ ID NO: 8308 - protein, 67 aa, Helicobacter pylori
  misc_feature (B) LOCATION 1...67
  hypothetical: YES
RFLKIASKRMEKIRAMAKIELLAKFTQIALPNSHPLLKKVLNYAKKHFSQCQHALFIITHLKRHGMF

SEQ ID NO: 8309 - protein, 227 aa, Helicobacter pylori
  misc_feature (B) LOCATION 1...227
  hypothetical: YES
TTLKNISASANMLSSSLLILNDTECFKKNYLLNWVYHALECAHEKDISMHSLEEILQKSHLPIRIKIMAQNTLLEKIEVKVLTFGAEYALFITKHPIAKRFLRQKFSGCVFLETQDELHIRGDSERFWELIVTLNENRIVHNACLDFIYPNGFGKDSYTTMAERKLKECYKALGFIKHENFSEVKKRYLELAKTYHPDLCNLKEKKALYAKRFAIIQEAYSHIKKHA

SEQ ID NO: 8310 - protein, 253 aa, Helicobacter pylori
  misc_feature (B) LOCATION 1...253
  hypothetical: YES
MAKIELLAKFTQIALPNSHPLLKKVLNYAKKHFSQCHMLSSSLLILNDTECFKKNYLLNWVYHALECAHEKDISMHSLEEILQKSHLPIRIKIMAQNTLLEKIEVKVLTFGAEYALFITKHPIAKRFLRQKFSGCVFLETQDELHIRGDSERFWELIVTLNENRIVHNACLDFIYPNGFGKDSYTTMAERKLKECYKALGFIKHENFSEVKKRYLELAKTYHPDLCDLKEKKALYAKRFAIIQEAYSHIKKHA

SEQ ID NO: 8311 - protein, 148 aa, Helicobacter pylori
  misc_feature (B) LOCATION 1...148
  hypothetical: YES
MDTPNKDDSIIRFSVSLQQNLLDELDNRIIKNGYSSRSELVRDMIREKLVEDNWVEDNPNDGSKIAVLVVIYDHHQRELNQRMIDIQHASGTHVLCTTHIHMDEHNCLETIILQGNSLEIQRLQLEIGGLRGVKFAKLTKASSFEYNE

SEQ ID NO: 8312 - protein, 163 aa, Helicobacter pylori
  misc_feature (B) LOCATION 1...163
  hypothetical: YES
HERLLTNSCQKGFSQMDTPNKDDSIIRFSVSLQQNLLDELDNRIIKNGYSSRSELVRDMIREKLVEDNWVEDNPNDGSKIAVLVVIYDHHQRELNQRMIDIQHASGTHVLCTTHIHMDEHNCLETIILQGNSLEIQRLQLEIGGLRGVKFAKLTKASSFEYNE

SEQ ID NO: 8313 - protein, 153 aa, Helicobacter pylori
  misc_feature (B) LOCATION 1...153
  hypothetical: YES
IFLPIKSSTYILKKIQKSYYATHEKEAFFLEHFYLTSVYVATTAGYYLTPKGAKTFIEATERFKIIEPVDMFMNNPTYHDVANFTYLPCPVSLNKHAFNSTIQNAKKPDISLKPPRKSYFDNLFYHKLNAQKCLKAFNKYSKRYAPLKTPKEV

SEQ ID NO: 8314 - protein, 250 aa, Helicobacter pylori
  misc_feature (B) LOCATION 1...250
  hypothetical: YES
METQQDPKELSESCKIAPQKTSFNPVVFKKIKRKLNLFIGNILARTEAYKNVVAKYDDLTGKYDDLNKNIAEKYDDLTGKYDDLNKNIAEKYDDLMGKYEALLAKETNIKETFWESRADNEKEALFLEHFYLTSVYVATTAGYYLTPKGAKTFIEATERFKIIEPVDMFMNNPTYHDVANFTYLPCPVSLNKHAFNSTIQNAKKPDISLKPPRKSYFDNLFYHKFNAQKCLKAFNKYSKRYAPLKTPKEV

SEQ ID NO: 8315 - protein, 71 aa, Helicobacter pylori
  misc_feature (B) LOCATION 1...71
  hypothetical: YES
KLLALPIDKIDPTHSYVKDIDDLSKHTLDKIKHFFETYKDLEPNKWVKVKGFENKESAIKVLEKAIKAYQG

SEQ ID NO: 8316 - protein, 173 aa, Helicobacter pylori
  misc_feature (B) LOCATION 1...173
  hypothetical: YES
MNLDQLEVSHDADSLCVVIEISKHSNIKYELDKESGALMVDRVLYGAQNYPANYGFVPNTLGSDGDPVDALVLSDVAFQAGSVVKARLVGVLNMEDESGMDEKLLALPIDKIDPTHSYVKDIDDLSKHTLDKIKHFFETYKDLEPNKWVKVKGFENKESAIKVLEKAIKAYQG

SEQ ID NO: 8317 - protein, 62 aa, Helicobacter pylori
  misc_feature (B) LOCATION 1...62
  hypothetical: YES
ILFEDKPCESVESAYMKLLALSLGKAPLRSLNLEGIFNQLSNAAWSGNKPYELEWLRTTKWL

SEQ ID NO: 8318 - protein, 83 aa, Helicobacter pylori
  misc_feature (B) LOCATION 1...83
  hypothetical: YES
MKLLALSLGKAPLRSLNLEGIFNQLSNAAWSGNKPYELEWLRTNEVALKMRGNFPSIDFIDKFPRYLMQLIPEFDNIRLLDSS

SEQ ID NO: 8319 - protein, 74 aa, Helicobacter pylori
  misc_feature (B) LOCATION 1...74
  hypothetical: YES
RKNPKRDASEYVVEIDESFVLKALDFYTPFLNEAYSNKMAHKNIQVVLELLKALEENRLKNSDGESLYRLVNLV

SEQ ID NO: 8320 - protein, 138 aa, Helicobacter pylori
  misc_feature (B) LOCATION 1...138
  hypothetical: YES
VIKFKNFVSNYQQSSCYREPLGFGIARVDIAPISKKILCATYPVLNWKEENLGSYAVFCNSLSKEKILKESASECVVEIDESFVLKALDFYTPFLNEAYSNKMAHKNIQVVLELLKALEENRLKNSDGESLYRLVNLV

SEQ ID NO: 8321 - protein, 167 aa, Helicobacter pylori
  misc_feature (B) LOCATION 1...167
  hypothetical: YES
MTTMNAIRWPKKWIPGETDNFVSNEVIVKGLDFNKVVQHLRDASHWEKYYKNSGNIHMYHQDNTILKDKTRFCFETFGFLVEAEVEEFELKDAILRLAWRGWNEAKGDEYLEVYHAWLVEKLDNDRVRILTQESQSGVPAKALAKSVPNAMLNGHQAWLDGLVAYSR

SEQ ID NO: 8322 - protein, 186 aa, Helicobacter pylori
  misc_feature (B) LOCATION 1...186
  hypothetical: YES
CYKSFANRAKKLKIKNGKNMTTMNAIRWPKKWIPEETDNFVSNEVIVKGLDFNKVVQHLRDASHWEKYYKNSGNIHMYHQDNTILKDKTRFCFETFGFLVEAEVEEFELKDAILRLAWRGWNEAKGDEYLEVYHAWLVEKLDNDRVRILTQESQSGVPAKALAKSVPNAMLNGHQAWLDGLVAYSR

SEQ ID NO: 8323 - protein, 72 aa, Helicobacter pylori
  misc_feature (B) LOCATION 1...72
  hypothetical: YES
LAKKGDYQGAFKLFSQSCDNGNAAGCFAVGAMYANGVGIQTNRLKAARYYEMGCSGGDATACANLAQMYENK

SEQ ID NO: 8324 - protein, 337 aa, Helicobacter pylori
  misc_feature (B) LOCATION 1...337
  hypothetical: YES
LSGAEENNQAPKNTPPELNPANTKGAPNPNTQITPKNDNSNLLDKLGSPENAQTELSAGIDLAKKGDYQGAFKLFSQSCDNGNAAGCFAVGAMYANGVGIQTNRLKAARYYEMGCSGGDATACANLAQMYENKKNADSNDKENALQLYAVACQGGDMLACNNLGWMFANGSGVPKDYYKAMSYYKFSCENGNDMGCYNLGLMSNVNNIYGIDKAQLSQVDLNYLACNAGDMMGCANLGWIYANGDLGAPLNNHYAAKYFQMACDGGILGSCNNLGVLYQKGLGVPQDDQRALDLFSYACDNGFESSCRNYGNFKEHLLHVNPNYGRLFMPYNSYEIP

SEQ ID NO: 8325 - protein, 173 aa, Helicobacter pylori
  misc_feature (B) LOCATION 1...173
  hypothetical: YES
CDDLANAWPVDGRALDCEKYIDEVFTSGHGKLYASDGRSSQNPTKNYGKGGLMQGKKYMLSLTWNAPIEAFNDPSEFFEGVGVDVVYLHLHKAFQFLGLSALPTFICNDVMKNPQVEQYLNSLTVHLRQALASDFKIRVFNPLIFWGLVYSTTKSLGLRLQPKIRSLRLLPVV

SEQ ID NO: 8326 - protein, 194 aa, Helicobacter pylori
  misc_feature (B) LOCATION 1...194
  hypothetical: YES
MKKVLIINGAKAFGHSGGKLNETLTHHAKKILESLGLEVDTTIVDKGYEKSQEVEKFFSADATIWQMPGWWMGEPWIVKKYIDEVFTSGHGKLYASDGRSSQNPTKNYGKGGLMQGKKYMLSLTWNAPIEAFNDPSEFFEGVGVDVVYLHLHKAFQFLGLSALPTFICNDVMKNPQVEQYLNSLTVHLRQAFGK

SEQ ID NO: 8327 - protein, 150 aa, Helicobacter pylori
  misc_feature (B) LOCATION 1...150
  hypothetical: YES
MHQNNKTFLPNQSAHLSKIVLFLNTGLLAYLLSACGANVPIEEVIVKDPKETKAQEVAREENAIQQENAIIDVRTTPLINRFTNYNAYGSLNGFYNSVDNLNSPMQNGMYGGYYMPYYYMPYGFMPYGSGLMPYGPYGYGAPGYFPYAFY

SEQ ID NO: 8328 - protein, 155 aa, Helicobacter pylori
  misc_feature (B) LOCATION 1...155
  hypothetical: YES
NVGKTMHQNNKTFLPNQSAHLSKIVLFLNTGLLAYLLSACGANVPIEEVIVKDPKETKAQEAAREENAIQQENAIIDVRTTPLINRFTNYNAYGSLNGFYNSVDNLNSPMQNGMYGGYYMPYYYMPYGFMPYGSGLMPYGPYGYGAPGYFPYAFY

SEQ ID NO: 8329 - protein, 64 aa, Helicobacter pylori
  misc_feature (B) LOCATION 1...64
  hypothetical: YES
MQMQIHNIHAHPFKKFTRIVKGFNGSVPGQTQHVFFTLHQAPFPVVFGGVLRTSAIASIKLPMP

SEQ ID NO: 8330 - protein, 69 aa, Helicobacter pylori
  misc_feature (B) LOCATION 1...69
  hypothetical: YES
KLERFMQMQIHNIHAHPFKKFTRIVKGFNGSVPGQTQHVFFTLHQAPFPVVFGGVLRTSAIASIKLPMP

SEQ ID NO: 8331 - protein, 169 aa, Helicobacter pylori
  misc_feature (B) LOCATION 1...169
  hypothetical: YES
GILMEQEICVIGFSGGQDSTTLAVWAKKRFKKVCLVGFDYAQKHSVELECAQKIASLLQLPYEIIPLDFLENITHSALFKNSNDLMGHSHAQNKDLPNSFVPNRNAIFITLLHSYAQKLGASNIALGVSQADFSGYPDCKEDFIKSIEHALNLGSNTAIKIVTPLMFLS

SEQ ID NO: 8332 - protein, 225 aa, Helicobacter pylori
  misc_feature (B) LOCATION 1...225
  hypothetical: YES
MEQEICVIGFSGGQDSTTLAVWAKKRFKKVCLVGFDYAQKHSVELECAQKIASLLQLPYEIIPLDFLENITHSALFKNSNDLMGHSHAQNKDLPNSFVPNRNAIFITLLHSYAQKLGASNIALGVSQADFSGYPDCKEDFIKSIEHALNLGSNTAIKIVTPLMFLSKAQEFQMAKDLGVLDLIIKETHTCYQGERKILHAYGYGCDKCPACQLRKKGFEEFQAML

SEQ ID NO: 8333 - protein, 68 aa, Helicobacter pylori
  misc_feature (B) LOCATION 1...68
  hypothetical: YES
MMQNSTKKLEYEERFNAALLKLQACPEEKQVASCLKCEKVLNCKIRNSYVDAAYESMSLGEAGGFDFN

SEQ ID NO: 8334 - protein, 79 aa, Helicobacter pylori
  misc_feature (B) LOCATION 1...79
  hypothetical: YES
SSDFRKTFKGRMMQNSTKKLEYEERFNAALLKLQACPEEKQVASCLKCEKVLNCKIRNSYVDAAYESMSLGEAGGFDFN

SEQ ID NO: 8335 - protein, 31 aa, Helicobacter pylori
  misc_feature (B) LOCATION 1...31
  hypothetical: YES
VMLKTNALKTKKYHQLAFESVYWLGKLSKRG

SEQ ID NO: 8336 - protein, 63 aa, Helicobacter pylori
  misc_feature (B) LOCATION 1...63
  hypothetical: YES
PLKQAKTIKCDLKIKKAFSTAWLWNKTINSGIVMLKTNALKTKKYHQLAFESVYWLGKLSKRG

SEQ ID NO: 8337 - protein, 89 aa, Helicobacter pylori
  misc_feature (B) LOCATION 1...89
  hypothetical: YES
KILNESIQSFKIQKMKRIWGSCNIAKRTLLFNLELAKAPRKGIEYVVVHELLHLKARHHNEYFRDLLSLYLPDWQRAKASLKETYLERS

SEQ ID NO: 8338 - protein, 117 aa, Helicobacter pylori
  misc_feature (B) LOCATION 1...117
  hypothetical: YES
WPVHVSCPLALNDESLRLSLIKRLPWIKEQQQNFLNQNRQSQREMLERESHYLFGKRYLLKIEHTIKKHFVLQSPKCLILHVHQKTSLENRLKVLENYYRQVLREKIQTYINQYERF

SEQ ID NO: 8339 - protein, 202 aa, Helicobacter pylori
  misc_feature (B) LOCATION 1...202
  hypothetical: YES
VHVSCPLALNDESLRLSLIKRLPWIKEQQQNFLNQNRQSQREMLERESHYLFGKRYLLKIEHTIKKHFVLQSPKCLILHVHQKTSLENRLKVLENYYRQVLREKIQTYINQYEKILNESIQSFKIQKMKRIWGSCNIAKRTLLFNLELAKAPRKGIEYVVVHELLHLKARHHNEYFRDLLSLYLPDWQRAKASLKETYLERS

SEQ ID NO: 8340 - protein, 94 aa, Helicobacter pylori
  misc_feature (B) LOCATION 1...94
  hypothetical: YES
RKEHQMAIFDNNNKSANAKTGPATIIAQGTKIKGELHLDYHLHINSELEGVVHAKNTVLIGQTGSVLGEIFANKLVLNGKFTGAVESECKHSCL

SEQ ID NO: 8341 - protein, 136 aa, Helicobacter pylori
  misc_feature (B) LOCATION 1...136
  hypothetical: YES
MAIFDNNNKSANAKTGPATIIAQGTKIKGELHLDYHLHVDGELEGVVHSKNTVVIGQTGSVVGEIFANKLVVNGKFTGTVEAEVVEIMPLGRLDGKISTQELVVERKGILIGETRPKNIQGGALLINEQEKKIENK

SEQ ID NO: 8342 - protein, 71 aa, Helicobacter pylori
  misc_feature (B) LOCATION 1...71
  hypothetical: YES
LFKICKNTNAGMRCNTVAKELANSSEAKRLHTPILSVTEIRFKANATNNTTVLGSYKNPAMVVKEIRLNST

SEQ ID NO: 8343 - protein, 98 aa, Helicobacter pylori
  misc_feature (B) LOCATION 1...98
  hypothetical: YES
MGVSALGNVTYINQNAPLNSAIQQGARSDMLDLAQSFQSKLELAQETRALENMQAISDKDPKEGSKNRYPNSQRAKAFGLEEEEIELWHEEHLLDIVG

SEQ ID NO: 8344 - protein, 104 aa, Helicobacter pylori
  misc_feature (B) LOCATION 1...104
  hypothetical: YES
TLKEVSMGVSALGNVTYINQNAPLNSAIQQGARSDMLDLAQSFQSKLELAQETRALENMQAISDKDPKEGSKNRYPNSQRAKAFGLEEEEIELWHEEHLLDIVG

SEQ ID NO: 8345 - protein, 180 aa, Helicobacter pylori
  misc_feature (B) LOCATION 1...180
  hypothetical: YES
MLLCAGRNETLKKAVPIGVGLIESAINLTRMCLKNPDTESLIFIGSAGSYSPETEILSVFESIEGYQIEESFSHLNSYTPLDNFIHIETKEQALFERVRVNSSNYIHTSEMFAKKMVQKGVLLENMEFFSVLSVAKIFSLKAKGIFCVSNHVGLNAHKEFKENHAKVKQILENIIDSLIV

SEQ ID NO: 8346 - protein, 180 aa, Helicobacter pylori; identical to SEQ ID NO: 8345
  misc_feature (B) LOCATION 1...180
  hypothetical: YES

SEQ ID NO: 8347 - protein, 189 aa, Helicobacter pylori
  misc_feature (B) LOCATION 1...189
  hypothetical: YES
ANGCEKRIFMLLCAGRNETLKKAVPIGVGLIESAINLTRMCLKNPDTESLIFIGSAGSYSPETEILSVFESIEGYQIEESFSHLNSYTPLDNFIHIETKEQALFERVRVNSSNYIHTSEMFAKKMVQKGVLLENMEFFSVLSVAKIFSLKAKGIFCVSNHVGLNAHKEFKENHAKVKQILENIIDSLIV

SEQ ID NO: 8348 - protein, 73 aa, Helicobacter pylori
  misc_feature (B) LOCATION 1...73
  hypothetical: YES
VIMLLHCKGFSSPLFYKLLKSAKSLFPTLLIKSSKNRVILLGSIPITKILSIRMFSVFPLNGVVIVGGCSVGF

SEQ ID NO: 8349 - protein, 77 aa, Helicobacter pylori
  misc_feature (B) LOCATION 1...77
  hypothetical: YES
MLLHCKGFSSPLFYKLLKSAKSLFPTLLIKSSKNRVILLGSIPITKILSIRMFSVFPLNGVVIRGRLFGWILSKFSQ

SEQ ID NO: 8350 - protein, 170 aa, Helicobacter pylori
  misc_feature (B) LOCATION 1...170
  hypothetical: YES
MRVLLFFILLLWFKGCGYKPIATYAQNALGDSVYVKLIVNLPNPENSVEFKDLMNRLVVQRFQNRLASEKDADSIIIIEITNVTDTSITQNKEGFTTFYRATVSVNYTYDNKRGTQKTFQNSGYYNYAVNLQDPLNTFQNRYYAINQAVEQTLTKFVAQIAYEGKFNNEK

SEQ ID NO: 8351 - protein, 174 aa, Helicobacter pylori
  misc_feature (B) LOCATION 1...174
  hypothetical: YES
FCYRMRVLLFFILLLWFKGCGYKPIATYAQNALGDSVYVKLIVNLPNPENSVEFKDLMNRLVVQRFQNRLASEKDADSIIIIEITNVTDTSITQNKEGFTTFYRATVSVNYTYDNKRGTQKTFQNSGYYNYAVNLQDPLNTFQNRYYAINQAVEQTLTKFVAQIAYEGKFNNEK

SEQ ID NO: 8352 - protein, 208 aa, Helicobacter pylori
  misc_feature (B) LOCATION 1...208
  hypothetical: YES
MEVICKHYTPLDIASQAIRTCWQSFEYSDDGGCKDRDLIHRVGNIFRHSSTLEHLYYNFEIKGLSRGALQELSRHRIASLSVKSSRYTLRELKEVESFLPLNETNLERAKEFLVFVDDEKVNEMSVLALENLRVLLSEHNIKNDLAKYAMPESYKTHLAYSINARSLQNLLTLRSSNKALKEMQDLAKALFDALPYEHQYLFEDCLKH

SEQ ID NO: 8353 - protein, 222 aa, Helicobacter pylori
  misc_feature (B) LOCATION 1...222
  hypothetical: YES
KRYRGIKSDIRSQIMEVICKHYTPLDIASQAIRTCWQSFEYSDDGGCKDRDLIHRVGNIFRHSSTLEHLYYNFEIKGLSRGALQELSRHRIASLSVKSSRYTLRELKEVESFLPLNETNLERAKEFLVFVDDEKVNEMSVLALENLRVLLSEHNIKNDLAKYAMPESYKTHLAYSINARSLQNLLTLRSSNKALKEMQDLAKALFDALPYEHQYLFEDCLKH

SEQ ID NO: 8354 - protein, 51 aa, Helicobacter pylori
  misc_feature (B) LOCATION 1...51
  hypothetical: YES
LIALSIKPTPIGTAFFKVSFLPAQSSMKILFSHPLAYYKASIIDKPLKETP

SEQ ID NO: 8355 - protein, 73 aa, Helicobacter pylori
  misc_feature (B) LOCATION 1...73
  hypothetical: YES
LPALPIKIRLSVSGFLRHILVKLIALSIKPTPIGTAFFKVSFLPAQSSMKILFSHPLAYYKASIIDKPLKETP

SEQ ID NO: 8356 - protein, 88 aa, Helicobacter pylori
  misc_feature (B) LOCATION 1...88
  hypothetical: YES
LNAAPVVNDEIRAVFGNRPCVFSNLHAIKKRKYIQRVFIVFHDQIPSKAVSEHVRLSARSFIENDIPVIHKKVIARIKPVISGVNLPA

SEQ ID NO: 8357 - protein, 94 aa, Helicobacter pylori
  misc_feature (B) LOCATION 1...94
  hypothetical: YES
SFERKPLNAAPVVNDEIRAVFGNRPCVFSNLHAIKKRKYIQRVFIVFHDQIPSKAVSEHVRLSARSFIENDIPVIHKKVIARIKPVISGVNLPA

SEQ ID NO: 8358 - protein, 107 aa, Helicobacter pylori
  misc_feature (B) LOCATION 1...107
  hypothetical: YES
LKEKEIKDINAFITWLYFKVVFIKTTCPNVSMALRIFSVLNARGLPLHAIDVFKVELLKKLAQKKDQEEFLSRWSALHQKCSENESKFPKRKENKREKNATDYSAGI

SEQ ID NO: 8359 - protein, 180 aa, Helicobacter pylori
  misc_feature (B) LOCATION 1...180
  hypothetical: YES
IIQGVFMANEVKGVDRPLKDILATALVSYYQIPDYQRPYQWTEKNCEKLLDDLFSSYEYYKESGYFCGSLVLIVINTDSETNAETYDIVDGQQRLSTFILLAKVLATLYDKDLDTTSRELLEKSLGDTGGEKRERLHFNAMGLNAKDDFVYALEHFNDSQASKNKNNKTNYLKNAICLKD

SEQ ID NO: 8360 - protein, 282 aa, Helicobacter pylori
  misc_feature (B) LOCATION 1...282
  hypothetical: YES
MANEVKGVDRPLKDILATALVSYYQIPDYQRPYQWTEKNCEKLLDDLFSSYEYYKESGYFCGSLVLIVINTDSETNAETYDIVDGQQRLSTFILLAKVLATLYDKDLDTTSRELLEKSLGDTGGEKRERLHFNAMGLNAKDDFVYALEHFNDSQASKNKNNKNNYLKNAICLKDYLKEKEIKDINAFITWLYFKVVFIKTTCPNVSMALRIFSVLNARGLPLHAIDVFKVELLKKLAQKKDQEEFLSRWSALHQKCSENESKFPKRKENKREKNATDYSAGI

SEQ ID NO: 8361 - protein, 202 aa, Helicobacter pylori
  misc_feature (B) LOCATION 1...202
  hypothetical: YES
VRGGGLFNGLNAVFKERRFILVQLDEKIEKNKSAYDFCLNTLKSTSPSIFDITEERIKRAGAKIKEACAHLDVGFRAFEIIDDETHTNDKNLGEAHQKDLFAYSNLDRMETQTILIKLLGCEGLELTTPIICLIENALYLALNTAFIVGDIEMSEVLENLKDKGVEKISVYMPAISNDRLCLELGSNLLDLKLESGDLKIRG

SEQ ID NO: 8362 - protein, 202 aa, Helicobacter pylori
  misc_feature (B) LOCATION 1...202
  hypothetical: YES
VRGGGLFNGLNAVFKERRFILVQLDEKIEKNKSAYDFCLNTLKSTSPSIFDITEERIKRAGAKIKEACAHLDVGFRAFEIIDDETHTNDKNLGEAHQKDLFAYSNLDRMETQTILIKLLGCEGLELTTPIICLIENALYLALNTAFIVGDIEMSEVLENLKDKGVEKISVYMPAISNDRLCLELGSNLLDLKLERGDLKIRG

SEQ ID NO: 8363 - protein, 343 aa, Helicobacter pylori
  misc_feature (B) LOCATION 1...343
  hypothetical: YES
DGKFHEWEHSRHAMGEYDVVIDTHFSRICHTDIHFAHSDWLPVMYPMVPGHEIAGVVSAVGSKVTKFKVGDHAGVGCMVNSCGECHTCKHEHQEQWCENNKTIYTYSWEDSFHNNEPTYGGYSNNIVVSENFVISIPKEAPLDKAAPLLCAGITVYSPLKFSKVTKGSKVGIAGFGGLGHMALKYAVAMGAQVSVFARNDKKKQMAQKLGATNFYTSVGECKEKFDLIVSSIPTQYDLLAYTKLLKYGGEVAIVGIPPKDPQRNLDFGDLVLFSGNHKVYGSWIGGVKETQEMMDFSVKHGIYPEIELVTGQEIDATWDKLLNGQGNFRYVIDMKKSMENFKK

SEQ ID NO: 8364 - protein, 365 aa, Helicobacter pylori
  misc_feature (B) LOCATION 1...365
  hypothetical: YES
MHNACNCNSQRVPFKGFAIDGKDGKFHEWEHSRHAMGEYDVVIDTHFSGICHTDIHFAHSDWLPGIYPMVPGHEIAGVVSAVGSKVTKFKVGDHAGVGCMVNSCGECHTCKHEHQEQWCENNKTIYTYSWEDSFHNNEPTYGGYSNNIVVSENFVISIPKEAPLDKAAPLLCAGITVYSPLKFSKVTKGSKVGIAGFGGLGHMALKYAVAMGAQVSVFARNDKKKQMAQKLGATNFYTSVGECKEKFDLIVSSIPTQYDLLAYTKLLKYGGEVAIVGIPPKDPQRNLDFGDLVLFSGNHKVYGSWIGGVKETQEMMDFSVKHGIYPEIELVTGQEIDATWDKLLNGQGNFRYVIDMKKSMENFKK

SEQ ID NO: 8365 - protein, 82 aa, Helicobacter pylori
  misc_feature (B) LOCATION 1...82
  hypothetical: YES
LVFLDRRLIVMVTDSKGSRYINVHILFRQISLYALLSVVGSLLFLGVSLLVLNKEIKNIEKQHALXTKEFEKKRETNEXLSX

SEQ ID NO: 8366 - protein, 312 aa, Helicobacter pylori
  misc_feature (B) LOCATION 1...312
  hypothetical: YES
VFLDRRLIVMVTDSKGSRYINVHILFRQISLYALLSVVGSLLFLGVSLLVLNKEIKNIEKQHALITKEFEKKRETNEKLSLQMDEFLDDLQLSGERINDLEEVVGVNRPEEEKEEGNFSSRLDVAGITGLQKSFIMRLIPNDYPLESYRRVSAAFNKRMHPILHVLHNHTGLDLSTAINTPVYASASGVVGLASKGWNGGYGNLIKVFHPFGFKTYYAHLNKIVVKTGEFVKKGQLIGYSGNTGMSTGPHLHYEVRFLDQPINPMSFTKWNMKDFEEVFNKERSIRWQSLITIINRLMQKQDQRLSSLKAPK

SEQ ID NO: 8367 - protein, 313 aa, Helicobacter pylori
  misc_feature (B) LOCATION 1...313
  hypothetical: YES
LVFLDRRLIVMVTDSKGSRYINVHILFRQISLYALLSVVGSLLFLGVSLLVLNKEIKNIEKQHALITKEFEKKRETNEKLSLQMDEFLDDLQLSGERINDLEEVVGVNRPEEEKEEGNFSSRLDVAGITGLQKSFIMRLIPNDYPLESYRRVSAAFNKRMHPILHVLHNHTGLDLSTAINTPVYASASGVVGLASKGWNGGYGNLIKVFHPFGFKTYYAHLNKIVVKTGEFVKKGQLIGYSGNTGMSTGPHLHYEVRFLDQPINPMSFTKWNMKDFEEVFNKERSIRWQSLITIINRLMQKQDQRLSSLKAPK

SEQ ID NO: 8368 - protein, 315 aa, Helicobacter pylori
  misc_feature (B) LOCATION 1...315
  hypothetical: YES
GFLVFLDRRLIVMVTDSKGSRYINVHILFRQISLYALLSVVGSLLFLGVSLLVLNKEIKNIEKQHALITKEFEKKRETNEKLSLQMDEFLDDLQLSGERINDLEEVVGVNRPEEEKEEGNFSSRLDVAGITGLQKSFIMRLIPNDYPLESYRRVSAAFNKRMHPILHVLHNHTGLDLSTAINTPVYASASGVVGLASKGWNGGYGNLIKVFHPFGFKTYYAHLNKIVVKTGEFVKKGQLIGYSGNTGMSTGPHLHYEVRFLDQPINPMSFTKWNMKDFEEVFNKERSIRWQSLITIINRLMQKQDQRLSSLKAPK

SEQ ID NO: 8369 - protein, 293 aa, Helicobacter pylori
  misc_feature (B) LOCATION 1...293
  hypothetical: YES
MEERLADQFERLNKPPLEYFKGVENFYNAYCKVLEMQDWHAHLLSYLASDFWRVILCTSILHHYSDQDIETLKELLVKFYYQNWVATREEPKKQTNCNIIKALKENKSVESIASIVKEYLDYHKITQDFKKNLQDSKLYEQHKKSSKNSWVKPVLILVEYSMSDNANPAYIKMDDDLHVERILPQNPDPSSQWVKDFSEEERELYTHSLANLTLLGGTKNTKALSQALNQDFKEKKEIYMGKTIALDNKKTFKVMTCYDMTKNDVCRYTEWMPKNLEKRKEELIKRIESVLTL

SEQ ID NO: 8370 - protein, 327 aa, Helicobacter pylori
  misc_feature (B) LOCATION 1...327
  hypothetical: YES
VKISKEKREQAREECHRLFSWYLTYLNPVTSGKSMEERLADQFERLNKPPLEYFKGVENFYNAYCKVLEMQDWHAHLLSYLASDFWRVILCTSILHHYSDQDIETLKELLVKFYYQNWVATREEPKKQTNCNIIKALKENKSVESIASIVKEYLDYHKITQDFKKNLQDSKLYEQHKKSSKNSWVKPVLILVEYSMSDNANPAYIKMDDDLHVERILPQNPDPSSQWVKDFSEEERELYTHSLANLTLLGGTKNTKALSQALNQDFKEKKEIYMGKTIALDNKKTFKVMTCYDMTKNDVCRYTEWMPKNLEKRKEELIKRIESVLTL

SEQ ID NO: 8371 - protein, 76 aa, Helicobacter pylori
  misc_feature (B) LOCATION 1...76
  hypothetical: YES
MTPSTTLNICFNKKNSKLILQIDFSQMDTETQEKFLAYLFEKALQKNLQAYWITTTETKNELTREEFSNLLKKNND

SEQ ID NO: 8372 - protein, 76 aa, Helicobacter pylori; identical to SEQ ID NO: 8371
  misc_feature (B) LOCATION 1...76
  hypothetical: YES

SEQ ID NO: 8373 - protein, 91 aa, Helicobacter pylori
  misc_feature (B) LOCATION 1...91
  hypothetical: YES
KLTQSFRLLSRECLRMTPSTTLNICFNKKNSKLILQIDFSQMDTETQEKFLAYLFEKALQKNLQAYWITTTETKNELTREEFSNLLKKNND

SEQ ID NO: 8374 - protein, 71 aa, Helicobacter pylori
  misc_feature (B) LOCATION 1...71
  hypothetical: YES
KKKKVLMFENALKYCKEKAIDLLTGFVPKTYSMTEECNILGLYDDTFIITKQENNANYSCASHNNWVVPNN

SEQ ID NO: 8375 - protein, 141 aa, Helicobacter pylori
  misc_feature (B) LOCATION 1...141
  hypothetical: YES
MFENALKYCKEKAIDLLTGFVPKTYSMTEECNILGLYDDTFIITKQENLVAIMSLQGLSYSNLMQKDLEGYFDTRQNVLNTISKDIQLRIVAKRRKEFINQSPNIDNIYAKAIITQFESKEIYKTEYFLIALVNLSVFNRI

SEQ ID NO: 8376 - protein, 132 aa, Helicobacter pylori
  misc_feature (B) LOCATION 1...132
  hypothetical: YES
MFENALKYCKEKAIDLLTGLFQKPILQRNAIFVCMMILSSSLNKKISLLCLYKDAILICKKTRVILILDKMFSTPLVKTFNELWLKGVRNLSIKVQILTIFMPKLLSHNLKARKSIKQSIFLLIYQYLIEFS

SEQ ID NO: 8377 - protein, 147 aa, Helicobacter pylori
  misc_feature (B) LOCATION 1...147
  hypothetical: YES
KKKKVLMFENALKYCKEKAIDLLTGFVPKTYSMTEECNILGLYDDTFIITKQENLVAIMSLQGLSYSNLMQKDLEGYFDTRQNVLNTISKDIQLRIVAKRRKEFINQSPNIDNIYAKAIITQFESKEIYKTEYFLIALVNLSVFNRI

SEQ ID NO: 8378 - protein, 143 aa, Helicobacter pylori
  misc_feature (B) LOCATION 1...143
  hypothetical: YES
MALVYLAQSDTTIGLLSKDSEKLNALKGRPKNQSVLIESTDFTTLKSLVRAPNAFKNLVRRSAKTTFIYPNSKAVRVVKGRHGDFLKRFKTLYSTSANLTQCAYDKEIASNLADVIVSDERGLFESGSSKIFKLYKHKKVRVR

SEQ ID NO: 8379 - protein, 146 aa, Helicobacter pylori
  misc_feature (B) LOCATION 1...146
  hypothetical: YES
SNLMALVYLAQSDTTIGLLSKDSEKLNALKGRPKNQSVLIESTDFTTLKSLVRAPNAFKNLVRRSAKTTFIYPNSKAVRVVKGRHGDFLKRFKTLYSTSANLTQCAYDKEIASNLADVIVSDERGLFESGTSKIFKLYKHKKVRVR

SEQ ID NO: 8380 - protein, 43 aa, Helicobacter pylori
  misc_feature (B) LOCATION 1...43
  hypothetical: YES
MIAFGIKAIELALQYPHAKKDFFTRRRLPFKREYQGVLGAFRL

SEQ ID NO: 8381 - protein, 110 aa, Helicobacter pylori
  misc_feature (B) LOCATION 1...110
  hypothetical: YES
VLRKLLGKNCIETHKGVGYRLTHYEKKSLKLFLGTYLGSSFVLMLVISVLAFNYEKNEKIKXIRMDMDKMASKIASEIIQLHMQTHADYHNALNALISRYKDVSIXLXDT

SEQ ID NO: 8382 - protein, 323 aa, Helicobacter pylori
  misc_feature (B) LOCATION 1...323
  hypothetical: YES
NALNALISRYKDASIALFDSKKRVLYSNIPESADLIKTHKEGGFFSFKGEYYLFSDETFAHLGVVKMLLKNSKPLHFSSLYRNMVLVFVVAFLCVIGVSVFLGRLFLKPIRNEIIRIDHFLKNTTHELNTPMSALGLSLKTLEDNQQHRRIKIAIQRMSFLYRSLSYLVMQDIERESFALLDLKALITKENTLFSEMIDYHKLEFKSDLVGVVLKAKEQDFISLYSNLLMNAIKYSVMHGYIHIELTPEFLKVKNLGYEIPKDKITKLSVRYARFNSSVLGYGIGLDLVKKVCEKYKMRLEIHSEPSLKGSFHENSFCVQFQG

SEQ ID NO: 8383 - protein, 322 aa, Helicobacter pylori
  misc_feature (B) LOCATION 1...322
  hypothetical: YES
ALNALISRYKDASIALFDSKKRVLYSNIPESADLIKTHKEGGFFSFKGEYYLFSDETFAHLGVVKMLLKNSKPLHFSSLYRNMVLVFVVAFLCVIGVSVFLGRLFLKPIRNEIIRIDHFLKNTTHELNTPMSALGLSLKTLEDNQQHRRIKIAIQRMSFLYRSLSYLVMQDIERESFALLDLKALITKENTLFSEMIDYHKLEFKSDLVGVVLKAKEQDFISLYSNLLMNAIKYSVMHGYIHIELTPEFLKVKNLGYEIPKDKITKLSVRYARFNSSVLGYGIGLDLVKKVCEKYKMRLEIHSEPSLKGSFHENSFCVQFQG

SEQ ID NO: 8384 - protein, 372 aa, Helicobacter pylori
  misc_feature (B) LOCATION 1...372
  hypothetical: YES
VLMLVISVLAFNYEKNEKIKMIRMDMDKMASKIASEIIQLHMQTHADYHNALNALISRYKDASIALFDSKKRVLYSNIPESADLIKTHKEGGFFSFKGEYYLFSDETFAHLGVAKMLFKNSKPLHFSSLYRNMVLVFVVAFLCVIGVSVFLGRLFLKPIRNEIIRIDHFLKNTTHELNTPMSALVLSLKTLEDNQQHRRIKIAIQRMSFLYRSLSYLVMQDIERESFALLDLKALITKENTLFSEMIDYHKLEFKSDLVGVVLKAKEQDFISLYSNLLMNAIKYSVMHGYIHIELTPEFLKVKNLGYEIPKDKITKLSVRYARFNSSVLGYGIGLDLVKKVCEKYKMRLEIHSEPSLKGSFHENSFCVQFQG

SEQ ID NO: 8385 - protein, 181 aa, Helicobacter pylori
  misc_feature (B) LOCATION 1...181
  hypothetical: YES
LYSPHYRKRYEDFLKADYPKILFTNNKDLFRALSLLGIELIGLHVLNRESLNHSFEKLKDPTIGESYYKEAHDRNPIIKKPSHKKLEQRLYINHSAYFRGVSEEIHDYMIGGYGVLDKYLKSHKNEPCDFDHVSNIIKIIARTIEIQKTLGFLTSDLPHLKGNDSKALIQEILQNPPPPPI

SEQ ID NO: 8386 - protein, 237 aa, Helicobacter pylori
  misc_feature (B) LOCATION 1...237
  hypothetical: YES
YTQSLLRHQKTRKSKGEHIQAHVTPPPPTNPKTPNQTRKNVALNTPRQLKNNDKSWTQCFISSQLNDQGLSSGGNGAGVNYPLYQFKHPNYTENFTPEFRSFIDKHYSHHFEPLEVLGYIYALLYSPHYRKRYEDFLKADYPKILFTNNKDLFRALSLLGIELIGLHVLNRESLNHSFEKLKDPTIGESYYKEAHDRNPIIKKPSHKKLEQRLYINHSAYFRGVSEEIHDYMIGGYG

SEQ ID NO: 8387 - protein, 238 aa, Helicobacter pylori
  misc_feature (B) LOCATION 1...238
  hypothetical: YES
YTQSLLRHQKTRKSKGEHIQAHVTPPPPTNPKTPNQTRKNVALNTPRQLKNNDKSWTQCFISSQLNDQGLSSGGNGAGVNYPLYQFKHPNYTENFTPEFRSFIDKHYSHHFEPLEVLGYIYALLYSPHYRKRYEDFLKADYPKILFTNNKDLFRALSLLGIELIGLHVLNRESLNHSFEKLKDPTIGESYYKEAHDRNPIIKKPSHKKLEQRLYINHSAYFRGVSEEIHDYMIGGYGV

SEQ ID NO: 8388 - protein, 304 aa, Helicobacter pylori
  misc_feature (B) LOCATION 1...304
  hypothetical: YES
YTQSLLRHQKTRKSKGEHIQAHVTPPPPTNPKTPNQTRKNVALNTPRQLKNNDKSWTQCFISSQLNDQGLSSGGNGAGVNYPLYQFKHPNYTENFTPEFRSFIDKHYSHHFEPLEVLGYIYALLYSPHYRKRYEDFLKADYPKILFTNNKDLFRALSLLGIELIGLHVLNRESLNHSFEKLKDPTIGESYYKEAHDRNPIIKKPSHKKLEQRLYINHSAYFRGVSEEIHDYMIGGYGVLDKYLKSHKNEPCDFDHVSNIIKIIARTIEIQKTLGFLTSDLPHLKGNDSKALIQEILQNPPPPPI

SEQ ID NO: 8389 - protein, 815 aa, Helicobacter pylori
  misc_feature (B) LOCATION 1...815
  hypothetical: YES
MLKEYLESIKDLTPESNELTHRPSLYNLLKNLKNDFKKELKIEHEPNRDKQGGQPDFRVSYQGLNIGYIENKRVGTDLNQLLESDQILKYLELNPNLMLTDYLNFVWVGKDEENKPSTKRKISIASLEELPKLKPNPQTERDLIELFRGFFNHEAAPITNAKDFANALSAPTRYLKDALIAYQKDDQVSSIFKNFKEYLYEELSFEDFSDAFAQTLTYSLFLAKLNHPFEKIDLNNVRSSIPKNFAVIREMADFLKKLDAIQEIQWLLNEILILINHVDMGPIIKDLNDDKDPYLHFYETFLSAYDPKLREKKGVYYTPDSVVEFIINALDSLLKTHFKDAPLGLKSALDNKNIKLLDFATGTGTFLLEAFRKALEVRKTSDGGASTKEDKYQNLLKQFYGFEYLIAPYAIAHLNLSQAFKEEFKKPLKENDTLKIILTNTLIQPSEIIAYRGLNPIFEKELSNAQEIKKNENILIITGNPPYSGASENKGLFEWEVKATYGIEPEFQTIEIEKNVKLTDKIQTLLKNVQKQKESGSKNALKELKNLHSKYKLQKEKNPKWLLDDYVKFMRFAQNKIELLGHGLFGFISNNAFLDNPTFRGLRRSLLECYDELYILNLHGNARRKEETPQGATDENVFNIMQGVSINLFVKKAQATKPKICYYDVYGERAEKYAFLAQNDLDRIEWLELAPREPFYLLIPQKTPLLEEYEQGFSVQEMFQISSVGIVTGKDKIFIANNTESLKEQVLKYCNEFNEQCVKDIHYRPFDIRKVYYDTKKLERARENTFKHMLPPPPQQTLKHPIKRAKMSRSTPHDS

SEQ ID NO: 8390 - protein, 820 aa, Helicobacter pylori
  misc_feature (B) LOCATION 1...820
  hypothetical: YES
KGVISMLKEYLESIKDLTPESNELTHRPSLYNLLKNLKNDFKKELKIEHEPNRDKQGGQPDFRVSYQGLNIGYIENKRVGTDLNQLLESDQILKYLELNPNLMLTDYLNFVWVGKDEENKPSTKRKISIASLEELPKLKPNPQTERDLIELFRGFFNHEAAPITNAKDFANALSAPTRYLKDALIAYQKDDQVSSIFKNFKEYLYEELSFEDFSDAFAQTLTYSLFLAKLNHPFEKIDLNNVRSSIPKNFAVIREMADFLKKLDAIQEIQWLLNEILILINHVDMGPIIKDLNDDKDPYLHFYETFLSAYDPKLREKKGVYYTPDSVVEFIINALDSLLKTHFKDAPLGLKSALDNKNIKLLDFATGTGTFLLEAFRKALEVRKTSDGGASTKEDKYQNLLKQFYGFEYLIAPYAIAHLNLSQAFKEEFKKPLKENDTLKIILTNTLIQPSEIIAYRGLNPIFEKELSNAQEIKKNENILIITGNPPYSGASENKGLFEWEVKATYGIEPEFQTIEIEKNVKLTDKIQTLLKNVQKQKESGSKNALKELKNLHSKYKLQKEKNPKWLLDDYVKFMRFAQNKIELLGHGLFGFISNNAFLDNPTFRGLRRSLLECYDELYILNLHGNARRKEETPQGATDENVFNIMQGVSINLFVKKAQATKPKICYYDVYGERAEKYAFLAQNDLDRIEWLELAPREPFYLLIPQKTPLLEEYEQGFSVQEMFQISSVGIVTGKDKIFIANNTESLKEQVLKYCNEFNEQCVKDIHYRPFDIRKVYYDTKKLERARENTFKHMLPPPPQQTLKHPIKRAKMSRSTPHDS

SEQ ID NO: 8391 - protein, 183 aa, Helicobacter pylori
  misc_feature (B) LOCATION 1...183
  hypothetical: YES
MAIWGWCFLFLSSLMWGSSMHELVLRSQALGFETRLVQCDLSFSYERFISKTKRSLAVLEEFDWLNSGFDFSRLNVENDTLELLKALYFKLEKLESLLLKENLLELEQKDRIIALGHGLVCLKKQSLIAPQTYYGRCVLEGKILAFFGVARDKDFLEITRMHALDIKRYDSFIVDSERKGLKL

SEQ ID NO: 8392 - protein, 183 aa, Helicobacter pylori; identical to SEQ ID NO: 8391
  misc_feature (B) LOCATION 1...183
  hypothetical: YES

SEQ ID NO: 8393 - protein, 184 aa, Helicobacter pylori
  misc_feature (B) LOCATION 1...184
  hypothetical: YES
VMAIWGWCFLFLSSLMWGSSMHELVLRSQALGFETRLVQCDLSFSYERFISKTKRSLAVLEEFDWLNSGFDFSRLNVENDTLELLKALYFKLEKLESLLLKENLLELEQKDRIIALGHGLVCLKKQSLIAPQTYYGRCVLEGKILAFFGVARDKDFLEITRMHALDIKRYDSFIVDSERKGLKL

SEQ ID NO: 8394 - protein, 68 aa, Helicobacter pylori
  misc_feature (B) LOCATION 1...68
  hypothetical: YES
RARLLRRKNHYLENKFKDMGHYAASDEVNEKQVLKMYQEGYSVDSISKEFKVSKGEVEFILNMAGLKW

SEQ ID NO: 8395 - protein, 115 aa, Helicobacter pylori
  misc_feature (B) LOCATION 1...115
  hypothetical: YES
TGAIMLSSNDLFMVVLGAILLVLVCLVGYLYLKEKEFYHKMRRLEKTLDESYQENYLYSKRLRELEGRLEGLSLEKSAKEDSSLKTTLSHLYNQLQEIQKSMDKERDYLEEKIIT

SEQ ID NO: 8396 - protein, 168 aa, Helicobacter pylori
  misc_feature (B) LOCATION 1...168
  hypothetical: YES
MLSSNDLFMVVLGAILLVLVCLVGYLYLKEKEFYHKMRRLEKTLDESYQENYLYSKRLRELEGRLEGLSLEKSAKEDSSLKTTLSHLYNQLQEIQKSMDKERDYLEEKIITLENKFKDMGHYAASDEVNEKQVLKMYQEGYSVDSISKEFKVSKGEVEFILNMAGLKW

SEQ ID NO: 8397 - protein, 68 aa, Helicobacter pylori
  misc_feature (B) LOCATION 1...68
  hypothetical: YES
MPFINIKLVPENGGPTNEQKQQLIEGVSDLMVKVLNKNKASIVVIIDEVDSNNYGLGGESIHHLRQKN

SEQ ID NO: 8398 - protein, 77 aa, Helicobacter pylori
  misc_feature (B) LOCATION 1...77
  hypothetical: YES
YAISILRNNMPFINIKLVPENGGPTNEQKQQLIEGVSDLMVKVLNKNKASIVVIIDEVDSNNYGLGGESIHHLRQKN

SEQ ID NO: 8399 - protein, 149 aa, Helicobacter pylori
  misc_feature (B) LOCATION 1...149
  hypothetical: YES
EIMTIKFFSPQYPTELEEFYAERIADNPLGFIQRLDLLPSISGFVQKLREHGGEFFEMRKGEKLIGICGLNHINQTEAELCKFHINTAYQSQGLGQKLYESVERYAFIKGYTKISLHVSKSQIKACNLYQKLGFTHIKEEDCVVELGEE

SEQ ID NO: 8400 - protein, 150 aa, Helicobacter pylori
  misc_feature (B) LOCATION 1...150
  hypothetical: YES
EIMTIKFFSPQYPTELEEFYAERIADNPLGFIQRLDLLPSISGFVQKLREHGGEFFEMRKGEKLIGICGLNHINQTEAELCKFHINTAYQSQGLGQKLYESVERYAFIKGYTKISLHVSKSQIKACNLYQKLGFTHIKEEDCVVELGEEA

SEQ ID NO: 8401 - protein, 161 aa, Helicobacter pylori
  misc_feature (B) LOCATION 1...161
  hypothetical: YES
MTIKIFSPQYPTELEEFYAERIADNPLGFIQRLDLLPSISGFVQKLREHGGEFFEMRKGEKLIGICGLNHINQTEAELCKFHINTAYQSQGLGQKLYESVERYAFIKGYTKISLHVSKSQIKACNLYQKLGFTHIKEEDCVVELGEEALIFPTLFMEKILS

SEQ ID NO: 8402 - protein, 43 aa, Helicobacter pylori
  misc_feature (B) LOCATION 1...43
  hypothetical: YES
MGLVASGINDEELLKWLQAFGLKMGLCFQVLDDIIDVTQDEKE

SEQ ID NO: 8403 - protein, 303 aa, Helicobacter pylori
  misc_feature (B) LOCATION 1...303
  hypothetical: YES
MSNPNLSFYCNECERFESFLKNHYLHLEGFHPYLEKAFFEMVLNGGKRFRPKLFLAVLCSLVGKKDYSNQQTEYFKIALSIECLHTYSLIHDDLPCMDNAILRRNHPTLHAKYDETTAVLIGDALNTYSFELLSNSLLESRIIVELVKILSANGGIKGMILGQALDCYFENTPLNLEQLTFLHEHKTAKLISASLIMGLVASGINDEELLKWLQAFGLKMGLCFQVLDDIIDVTQDEKESGKTTHLDSAKNSFVNLLGLKKASGYAQTLKTEILNDLNALEPTYLSLQENLNALLNTLFKGKT

SEQ ID NO: 8404 - protein, 308 aa, Helicobacter pylori
  misc_feature (B) LOCATION 1...308
  hypothetical: YES
VIILGMSNPNLSFYCNECERFESFLKNHYLHLEGFHPYLEKAFFEMVLNGGKRFRPKLFLAVLCSLVGKKDYSNQQTEYFKIALSIECLHTYSLIHDDLPCMDNAILRRNHPTLHAKYDETTAVLIGDALNTYSFELLSNSLLESRIIVELVKILSANGGIKGMILGQALDCYFENTPLNLEQLTFLHEHKTAKLISASLIMGLVASGINDEELLKWLQAFGLKMGLCFQVLDDIIDVTQDEKESGKTTHLDSAKNSFVNLLGLKKASGYAQTLKTEILNDLNALEPTYLSLQENLNALLNTLFKGKT

SEQ ID NO: 8405 - protein, 381 aa, Helicobacter pylori
  misc_feature (B) LOCATION 1...381
  hypothetical: YES
MNLNFMPLLHAYNHVSIDFHFNSSARDFCVHEVPLYEFSNTGEHAVIQVRKSGLSTLEMLQIFSQILGVKIAELGYAGLKDKNALTTQFISLPKKYAPLLEKNTSNFQERNLKILSLNYHHNKIKLGHLKGNRFFMRFKKMTPLNAQKTEQVLEQIAQFGMPNYFGSQRFGKFNDNHKEGLKILQNETKFAHQKLNAFLISSYQSYLFNSLLSKRLEISKIISAFSVKESLEFFKQKNLSVHSNALKALKNQAHPFKILEGDVMRHYPYGKFFDALELEKESERFLNKEAVPTGLLDGKKALYAKNLSLEIEKGFQHNLLSGHAKTLGSRRFFWVFVENITSQYIKEKAQFELEFYLPKGSYASALLKEIKHEKGENNDEF

SEQ ID NO: 8406 - protein, 386 aa, Helicobacter pylori
  misc_feature (B) LOCATION 1...386
  hypothetical: YES
FKDQGMNLNFMPLLHAYNHVSIDFHFNSSARDFCVHEVPLYEFSNTGEHAVIQVRKSGLSTLEMLQIFSQILGVKIAELGYAGLKDKNALTTQFISLPKKYAPLLEKNTSNFQERNLKILSLNYHHNKIKLGHLKGNRFFMRFKKMTPLNAQKTEQVLEQIAQFGMPNYFGSQRFGKFNDNHKEGLKILQNETKFAHQKLNAFLISSYQSYLFNSLLSKRLEISKIISAFSVKESLEFFKQKNLSVHSNALKALKNQAHPFKILEGDVMRHYPYGKFFDALELEKESERFLNKEAVPTGLLDGKKALYAKNLSLEIEKGFQHNLLSGHAKTLGSRRFFWVFVENITSQYIKEKAQFELEFYLPKGSYASALLKEIKHEKGENNDEF

SEQ ID NO: 8407 - protein, 291 aa, Helicobacter pylori
  misc_feature (B) LOCATION 1...291
  hypothetical: YES
MGVFLDKSIKEVVDELNGRYFLPDIQREYVWLQNADGKKIEQLFDSILRGYPIGFFLFWKLPKEDIAKSDEQDSDKLNFQLYQFITNYDERKPHNEKIRIEQIKRDDLYIVLDGQQRLTSLYIGLKGTRTLKKKNARYDNPNAYEEKRLYLNLKHQPNMDNPEDNYEFEFHAQKPENDKKHWWFKVGDILESESHVWNYADEHGLKGNELKLLGDLHRAFHTKQLVSFFEETEKNLNKVLNIFIRVNSGGVKLSYSDLLMSILTASFSSDIREKMNELVDALKDKGFSNMG

SEQ ID NO: 8408 - protein, 299 aa, Helicobacter pylori
  misc_feature (B) LOCATION 1...299
  hypothetical: YES
IIQDKEIPMGVFLDKSIKEVVDELNGRYFLPDIQREYVWLQNADGKKIEQLFDSILRGYPIGFFLFWKLPKEDIAKSDEQDSDKLNFQLYQFITNYDERKPHNEKIRIEQIKRDDLYIVLDGQQRLTSLYIGLKGTRTLKKKNARYDNPNAYEEKRLYLNLKHQPNMDNPEDNYEFEFHAQKPENDKKHWWFKVGDILESESHVWNYADEHGLKGNELKLLGDLHRAFHTKQLVSFFEETEKNLNKVLNIFIRVNSGGVKLSYSDLLMSILTASFSSDIREKMNELVDALKDKGFSNMG

SEQ ID NO: 8409 - protein, 274 aa, Helicobacter pylori
  misc_feature (B) LOCATION 1...274
  hypothetical: YES
VLKTCLLLIGKDTTFELKNFNKQNIKEIEDNWEKITESIYNATKLLENFGYAGYLGSVYILSSLAYFYFLKSKMNENDKEQALKFVRNAQITSYFTPSTDTKLSIIAHSMKDAPTFESFNHNLAKHQTSPLKITNDAIEEMMCSSSHARVFPILQILYPNLNYKTTTFHIDHIYPKSKFKKENKKLDKDFYECGNHLYNLQLLEGTENQAKKDKDPEVWLKEEYKDNQQAIEEYKKRNYIDPNLRLEWENIKEFREKREEAIIEKLKEVLLPKS

SEQ ID NO: 8410 - protein, 276 aa, Helicobacter pylori
  misc_feature (B) LOCATION 1...276
  hypothetical: YES
DQVLKTCLLLIGKDTTFELKNFNKQNIKEIEDNWEKITESIYNATKLLENFGYAGYLGSVYILSSLAYFYFLKSKMNENDKEQALKFVRNAQITSYFTPSTDTKLSIIAHSMKDAPTFESFNHNLAKHQTSPLKITNDAIEEMMCSSSHARVFPILQILYPNLNYKTTTFHIDHIYPKSKFKKENKKLDKDFYECGNHLYNLQLLEGTENQAKKDKDPEVWLKEEYKDNQQAIEEYKKRNYIDPNLRLEWENIKEFREKREEAIIEKLKEVLLPKS

SEQ ID NO: 8411 - protein, 103 aa, Helicobacter pylori
  misc_feature (B) LOCATION 1...103
  hypothetical: YES
RQDMKKILLTNDDGYHAKGIKALEQALENMAEIYVVAPKHEKSACSQCITITAPLRAEKIKGKEGRHYRIDDGTPSDCVYLAINELFKHVCFDLVIYRDQSWL

SEQ ID NO: 8412 - protein, 167 aa, Helicobacter pylori
  misc_feature (B) LOCATION 1...167
  hypothetical: YES
HGAKITIYSGTVAGAIEGTIQGVPSIAISQILSNKNKNTPLSFDLAQKIIQDLVQNVFTKGYPLKGRKLLNVNVPNCSLQEYKGERITPKGYRLYKKEVHKRTDPKNESYFWLGLHPLKWQKRENEDRLSDFDAIASNHASITPLNLDLTSYDDLKSLESWHEGMLK

SEQ ID NO: 8413 - protein, 267 aa, Helicobacter pylori
  misc_feature (B) LOCATION 1...267
  hypothetical: YES
MKKILLTNDDGYHAKGIKALEQALENMAEIYVVAPKHEKSACSQCITITAPLRAEKIKGKEGRHYRIDDGTPSDCVYLAINELFKHVCFDLVISGINLGSNMGEDTIYSGTVAGAIEGTIQGVPSIAISQILSNKNKNTPLSFDLAQKIIQDLVQNVFTKGYPLKGRKLLNVNVPNCSLQEYKGERITPKGYRLYKKEVHKRTDPKNESYFWLGLHPLKWQKRENEDRLSDFDAIASNHASITPLNLDLTSYDDLKSLESWHEGMLK

SEQ ID NO: 8414 - protein, 62 aa, Helicobacter pylori
  misc_feature (B) LOCATION 1...62
  hypothetical: YES
KRLRESFLKDLENPHFKSLVHDHCVSFSQGIQSLWHDKDFFHKIISDEKQCFFHAKPLHQIP

SEQ ID NO: 8415 - protein, 145 aa, Helicobacter pylori
  misc_feature (B) LOCATION 1...145
  hypothetical: YES
MVIRRLYKFCASHVVRNCSSLKCAQNIHGHNYEVEVFIETNRLDNANMALDFGLMQQEMQTFIDSFDHAHHFWDKESPEFQRFIENHCVRYVKCSFNLSAESYALMFLYYLTKILQKSVFSNNEGELKVSSVRVHETKNGYAKAF

SEQ ID NO: 8416 - protein, 157 aa, Helicobacter pylori
  misc_feature (B) LOCATION 1...157
  hypothetical: YES
DCPFISHVIGNEMVIRRLYKFCASHVVRNCSSLKCAQNIHGHNYEVEVFIETNRLDNANMALDFGLMQQEMQTFIDSFDHAHHFWDKESPEFQRFIENHCVRYVKCSFNLSAESYALMFLYYLTKILQKSVFSNNEGELKVSSVRVHETKNGYAKAF

SEQ ID NO: 8417 - protein, 200 aa, Helicobacter pylori
  misc_feature (B) LOCATION 1...200
  hypothetical: YES
MVIRRLYKFCASHVVRNCSSLKCAQNIHGHNYEVEVFIETNRLDNANMALDFGLMQQEMQTFIDSFDHAHHFWDKESPEFQRFIENHCVRYVKCSFNLSAESYALMFLYYLTKILQKSVFSNNEGELKVSSVRVHETKNGYAESFLKDLENPHFKSLVHDHCVSFSQGIQSLWHDKDFFHKIISDEKQCFFHAKPLHQIP

SEQ ID NO: 8418 - protein, 77 aa, Helicobacter pylori
  misc_feature (B) LOCATION 1...77
  hypothetical: YES
IASILSSFKNRKIDNKTAFLGEVSLNGRILEAPNLNARLKEMENYGFLKAILPKKPSQKTSIKCYEANVVGKIVEWM

SEQ ID NO: 8419 - protein, 76 aa, Helicobacter pylori
  misc_feature (B) LOCATION 1...76
  hypothetical: YES
ASILSSFKNRKIDNKTAFLGEVSLNGRILEAPNLNARLKEMENYGFLKAILPKKPSQKTSIKCYEANVVGKIVEWM

SEQ ID NO: 8420 - protein, 136 aa, Helicobacter pylori
  misc_feature (B) LOCATION 1...136
  hypothetical: YES
VREITFELMRLAKTRDIAIFIIGHITKEGSIAGPRVLEHMVDSVLYFEGDPSRELRILRSFKNRFGPTSEIGLFEMKEQGLVSAKEASSLFFSKEEPMEGSAITITLEGSRALILEIQALVSECSFGAPKRLSERV

SEQ ID NO: 8421 - protein, 135 aa, Helicobacter pylori
  misc_feature (B) LOCATION 1...135
  hypothetical: YES
REITFELMRLAKTRDIAIFIIGHITKEGSIAGPRVLEHMVDSVLYFEGDPSRELRILRSFKNRFGPTSEIGLFEMKEQGLVSAKEASSLFFSKEEPMEGSAITITLEGSRALILEIQALVSECSFGAPKRLSERV

SEQ ID NO: 8422 - protein, 185 aa, Helicobacter pylori
  misc_feature (B) LOCATION 1...185
  hypothetical: YES
PHEFHYKAKPHFYLVFSCVILKKRDILAKKTSLFECQHCGFTSPKWLGKCVQCNAWESFIELNQTQKEVLNALKKPLPQVQKSVSIAEIEHEEVIKFSSTQSELDIVLGGGIAKGGLYLVGGSPGVGKSTLLLKVASGLAKNQQKVLYVSGEESLSQIKMRATRLDCIEEELYLLNESIACDQSQ

SEQ ID NO: 8423 - protein, 456 aa, Helicobacter pylori
  misc_feature (B) LOCATION 1...456
  hypothetical: YES
VILKKRDILAKKTSLFECQHCGFTSPKWLGKCVQCNAWESFIELNQTQKEVLNALKKPLPQVQKSVSIAEIEHEEVIKFSSTQSELDIVLGGGIAKGGLYLVGGSPGVGKSTLLLKVASGLAKNQQKVLYVSGEESLSQIKMRATRLDCIEEELYLLNEINWPVIKANMESENYFACVIDSIQTLYSPEISSAPGSISQVREITFELMRLAKTRDIAIFIIGHITKEGSIAGPRVLEHMVDSVLYFEGDPSRELRILRSFKNRFGPTSEIGLFEMKEQGLVSAKEASSLFFSKEEPMEGSAITITLEGSRALILEIQALVSECSFGAPKRLANGFDTNRLNMLIALLEKKLEIPLNRHDVFINVSGGIKISEPACDLAVIASILSSFKNRKIDNKTAFLGEVSLNGRILEAPNLNARLKEMENYGFLKAILPKKPSQKTSIKCYEANVVGKIVEWM

SEQ ID NO: 8424 - protein, 70 aa, Helicobacter pylori
  misc_feature (B) LOCATION 1...70
  hypothetical: YES
NFKENTHLLQRIYLDNNATTRIDPKVKEIMDPFLRDHYGNPSSLHQFGTETHPAIAEALDKLYKGITLGI

SEQ ID NO: 8425 - protein, 91 aa, Helicobacter pylori
  misc_feature (B) LOCATION 1...91
  hypothetical: YES
GNRVNRVPNTTLISVRGIEGEAMLWDLNRSNIAASTGSACASEDLEANPVMVAIGASKELAHTAIRLSLSRFNTEAEIDKTILFCMSQIGL

SEQ ID NO: 8426 - protein, 93 aa, Helicobacter pylori
  misc_feature (B) LOCATION 1...93
  hypothetical: YES
RAQVSWPEVIGGLYIRSGVGLTPLFHGGEHMSGRRSGTLNVPYIVGMGEAMKLAVEHLDYEKEVVGKLRDKLEEALLKIPDVMVVGESSKSCA

SEQ ID NO: 8427 - protein, 387 aa, Helicobacter pylori
  misc_feature (B) LOCATION 1...387
  hypothetical: YES
LLQRIYLDNNATTRIDPKVKEIMDPFLRDHYGNPSSLHQFGTETHPAIAEALDKLYKGINARDIDDVIITSCATESNNWVLKGVYFDECLKKGKNHIITTVAEHPAVRSTCNFLESLGVEVTYLPINEHGSITADQVKEAITEKTALVSVMWANNETGLIFPIEEIGAICKEKGVLFHTDAVQAIGKIPVDVLKANVDFLSFSAHKFHGPKGIGGLYIRSGVGLTPLFHGGEHMNGRRSGTLNVPYIVGMGEAMKLAVEHLDYEKEVVGKLRDKLEEALLKIPDVMVVGDRVHRVPNTTLISVRGIEGEAMLWDLNRSNIAASTGSACASEDLEANPVMVAIGASKELAHTAIRLSLSRFNTEAEIDKTIEVFSQAAVRLRNISSSY

SEQ ID NO: 8428 - protein, 391 aa, Helicobacter pylori
  misc_feature (B) LOCATION 1...391
  hypothetical: YES
LLQRIYLDNNATTRIDPKVKEIMDPFLRDHYGNPSSLHQFGTETHPAIAEALDKLYKGINARDIDDVIITSCATESNNWVLKGVYFDECLKKGKNHIITTVAEHPAVRSTCNFLESLGVEVTYLPINEHGSITADQVKEAITEKTALVSVMWANNETGLIFPIEEIGAICKEKGVLFHTDAVQAIGKIPVDVLKANVDFLSFSAHKFHGPKGIGGLYIRSGVGLTPLFHGGEHMNGRRSGTLNVPYIVGMGEAMKLAVEHLDYEKEVVGKLRDKLEEALLKIPDVMVVGDRVHRVPNTTLISVRGIEGEAMLWDLNRSNIAASTGSACASEDLEANPVMVAIGASKELAHTAIRLSLSRFNTEAEIDKTIEVFSQAAVRLRNIFKLLLKRI

SEQ ID NO: 8429 - protein, 312 aa, Helicobacter pylori
  misc_feature (B) LOCATION 1...312
  hypothetical: YES
LNNLEPLGAEVFVGLDGIDAMIEECVSNLVINAIVGVAGLKASFKSLQRNKKLALANKESLVSAGHLLDISQITPVDSEHFGLWALLQNKTLKPKSLIISASGGAFRDTPLDLIAIQNAQNALKHPNWSMGDKITIDSASMVNKLFEILETYWLFGASLKIDALIERSSIVHALVEFEDNSVIAHLASADMQLPISYAINPKLASLSASIKPLDLYALSAIKFEPISVERYTLWRYKDLLLENPKLGVVLNASNEVAMKKFLNQEIAFGGFIQIISQALELYAKKSFKLSSLDEVLALDKEVRERFGSVARV

SEQ ID NO: 8430 - protein, 325 aa, Helicobacter pylori
  misc_feature (B) LOCATION 1...325
  hypothetical: YES
RHPIENSICDLSELNNLKPLGAEMFVGLDGIDAMIEECVSNLVINAIVGVPGLKASFKSLQRNKKLALANKESLVSAGHLLDISQITPVDSEHFGLWALLQNKTLKPKSLIISASGGAFRDTPLDLIAIQNAQNALKHPNWSMGDKITIDSASMVNKLFEILETYWLFGASLKIDALIERNSIVHALVEFEDNSVIAHLASADMQLPISYAINPKLASLSASIKPLDLYALSAIKFEPISVERYTLWRYKDLLLENPKLGVVLNASNEVAMKKFLNQEIAFGGFIQIISQALELYAKKSFKLSSLDEVLALDKEVRERFGSVARV

SEQ ID NO: 8431 - protein, 324 aa, Helicobacter pylori
  misc_feature (B) LOCATION 1...324
  hypothetical: YES
HPIENSICDLSELNNLKPLGAEMFVGLDGIDAMIEECVSNLVINAIVGVPGLKASFKSLQRNKKLALANKESLVSAGHLLDISQITPVDSEHFGLWALLQNKTLKPKSLIISASGGAFRDTPLDLIAIQNAQNALKHPNWSMGDKITIDSASMVNKLFEILETYWLFGASLKIDALIERNSIVHALVEFEDNSVIAHLASADMQLPISYAINPKLASLSASIKPLDLYALSAIKFEPISVERYTLWRYKDLLLENPKLGVVLNASNEVAMKKFLNQEIAFGGFIQIISQALELYAKKSFKLSSLDEVLALDKEVRERFGSVARV

SEQ ID NO: 8432 - protein, 368 aa, Helicobacter pylori
  misc_feature (B) LOCATION 1...368
  hypothetical: YES
MVVLGSTGSIGKNALKIAKKFGVKIEALSCGKNIALINEQIKVFKPKKVAILDPNDLNNLEPLGAEVFVGLDGIDAMIEECVSNLVINAIVGVAGLKASFKSLQRNKKLALANKESLVSAGHLLDISQITPVDSEHFGLWALLQNKTLKPKSLIISASGGAFRDTPLDLIAIQNAQNALKHPNWSMGDKITIDSASMVNKLFEILETYWLFGASLKIDALIERSSIVHALVEFEDNSVIAHLASADMQLPISYAINPKLASLSASIKPLDLYALSAIKFEPISVERYTLWRYKDLLLENPKLGVVLNASNEVAMKKFLNQEIAFGGFIQIISQALELYAKKSFKLSSLDEVLALDKEVRERFGSVARV

SEQ ID NO: 8433 - protein, 368 aa, Helicobacter pylori; identical to SEQ ID NO: 8432
  misc_feature (B) LOCATION 1...368
  hypothetical: YES

SEQ ID NO: 8434 - protein, 120 aa, Helicobacter pylori
  misc_feature (B) LOCATION 1...120
  hypothetical: YES
RDYYLVDILKEVREEMEAEKLKATANKSQNGELAFREMTMVQKIKAVDKVIDENIRAMLMMDGGDLEILDIKESDDYIDVYIRYIGGACDGCMSATTGTLFAIENALQELLDRSIRVLPI

SEQ ID NO: 8435 - protein, 281 aa, Helicobacter pylori
  misc_feature (B) LOCATION 1...281
  hypothetical: YES
VADYGAEACGDAVRLYWLVDESTDIIIDAKFKSFGCGTAIASSDMMVELCLNKRVQDAVKITNLDVERGLRDDPDTPAVPGQKMHCSVMAYDVIKKAAGMYLGKNAEDFEEEIIVCECARVSLGTIKEVIRLNDLKSVEEITNYTKAGAFCKSCVRPGGHEKRDYYLVDILKEVREEMEAEKLKATANKSQNGELAFREMTMVQKIKAVDKVIDENIRAMLMMDGGDLEILDIKESDDYIDVYIRYMGACDGCMSATTGTLFAIENALQELLDRSIRVLPI

SEQ ID NO: 8436 - protein, 185 aa, Helicobacter pylori
  misc_feature (B) LOCATION 1...185
  hypothetical: YES
VVFKILSLWLGVFCFLRATHLYLGEEPKYKDNFTHFEYANPNARKGGVLRNDAIGTFDSLNPFALKGTKAEGLDLIYDTLMVQSLDEPFAEYPLIAKDAEVAKDNSYVIFTLDKRARFSNNAPILASDVKFSFDTIMKLGSPLYRQYYQDVKKAVILDKHHVKFIYKTTENKELPLILGQLQIFS

SEQ ID NO: 8437 - protein, 546 aa, Helicobacter pylori
  misc_feature (B) LOCATION 1...546
  hypothetical: YES
LRNDAIGTFDSLNPFALKGTKAEGLDLIYDTLMVQSLDEPFAEYPLIAKDAEVAKDNSYVIFTLDKRARFSNNAPILASDVKFSFDTIMKLGSPLYRQYYQDVKKAVILDKHHVKFIFKTTENKELPLILGQLQIFSKKAFQKDYFEKNPLLIPVSSGPYVIASFDVGKKITYQRNPNYWAKNLPSRKGQFNFDQIKFEYYKDETVALQAFLSGAYDWRLESTAKVWARGYVGKAMDNKKITKYLIAHKMPSGMQGFFFNTRREIFKDKRVREALFYAFDFEWANKNLFFSQYKRTTSFFSNSIYASPPLPSPEEKALLAPYEKSLDERVFKEPYIVPRTDGPDVLGYNLRENLKYAQKLLESAGFSYKNMRLVDKNNKPFSFTLLLNSPAFERLALAFAKNLRVLGIEMKIQRVDLSQYVNRIKSYDFDMIVGVIGQSSFPGNEQRFYFGSLSAKEKGTRNYAGISSKAVDDLIEKIINAKDYKEQLAAIQAMDRVLLWGFYVIPHFYLPNYRIAAYNYIGMPEISPSYGFSPYLWWIKKERGPK

SEQ ID NO: 8438 - protein, 594 aa, Helicobacter pylori
  misc_feature (B) LOCATION 1...594
  hypothetical: YES
VVFKILSLWLGVFCFLRATHLYLGEEPKYKDNFTHFEYANPNARKGGVLRNDAIGTFDSLNPFALKGTKAEGLDLIYDTLMVQSLDEPFAEYPLIAKDAEVAKDNSYVIFTLDKRARFSNNAPILASDVKFSFDTIMKLGSPLYRQYYQDVKKAVILDKHHVKFIFKTTENKELPLILGQLQIFSKKAFQKDYFEKNPLLIPVSSGPYVIASFDVGKKITYQRNPNYWAKNLPSRKGQFNFDQIKFEYYKDETVALQAFLSGAYDWRLESTAKVWARGYVGKAMDNKKITKYLIAHKMPSGMQGFFFNTRREIFKDKRVREALFYAFDFEWANKNLFFSQYKRTTSFFSNSIYASPPLPSPEEKALLAPYEKSLDERVFKEPYIVPRTDGPDVLGYNLRENLKYAQKLLESAGFSYKNMRLVDKNNKPFSFTLLLNSPAFERLALAFAKNLRVLGIEMKIQRVDLSQYVNRIKSYDFDMIVGVIGQSSFPGNEQRFYFGSLSAKAKGTRNYARISSKAVDDLIERIIHAKDYKEQLAAIQAMDRVLLRGFYAIPHFYLPNYRIAAYNYIGMPEISPSYGFSPYLWWIKKERGPK

SEQ ID NO: 8439 - protein, 644 aa, Helicobacter pylori
  misc_feature (B) LOCATION 1...644
  hypothetical: YES
MQGFLRSLFFGVKKIPKRFAPLVEKGVLKEALQSNKDRYLLKEGFDIGKIERVKNKAFFISLAKNYPKDPLIKNLPPSFKTDALILCQIECSKKRPIAFFKAALLNADHAMIAYLAKEKNQIVAIPFKEPFKKPISLKHSQRSLLELPRHCVVKIDLKKREISEILGALEDPLIDENLSLSLFDRIKDFSKDCLDLAQYYAQLKASDFKDRINYSHIPFITIDPKDAKDFDDAIFYDKEKNTLFVAVADVSEFVPKHSSLDKEARIRGFSVYFPNSVYPMLPLSLSQGACSLKAFEKRLALVYEIPLDNLKNARLSQGVIEVRANCAYEEINHFLNTQQSSLGKDLQQSLLGFLEVALKLKKERLKKGFNFNSFENKLYLNEEGRIEKIETEKESGAHTLIEEAMLLANQSSARLLDGHFHNRGIYRTHKEPSLEQQKRLYDKLFDYEIVRPKNMGFFPFLEHALKISQEKSIEREVSRLIIKSQNLALYSPMQESHFGLGFASYTHFTSPIRRYSDLALHRLLKELLFHQAKGCSYLLEETPELCAELNALQKKAALIERDFIKRKFARLALEFLEKEFLGVVLEAKDWVVVGLKEFIGLKVLIKTNKVFKPLEKVRIKITHADLILGQVRGEITERIKEHVS

SEQ ID NO: 8440 - protein, 651 aa, Helicobacter pylori
  misc_feature (B) LOCATION 1...651
  hypothetical: YES
SHAKCFLMQGFLRSLFFGVKKIPKRFAPLVEKGVLKEALQSNKDRYLLKEGFDIGKIERVKNKAFFISLAKNYPKDPLIKNLPPSFKTDALILCQIECSKKRPIAFFKAALLNADHAMIAYLAKEKNQIVAIPFKEPFKKPISLKHSQRSLLELPRHCVVKIDLKKREISEILGALEDPLIDENLSLSLFDRIKDFSKDCLDLAQYYAQLKASDFKDRINYSHIPFITIDPKDAKDFDDAIFYDKEKNTLFVAVADVSEFVPKHSSLDKEARIRGFSVYFPNSVYPMLPLSLSQGACSLKAFEKRLALVYEIPLDNLKNARLSQGVIEVRANCAYEEINHFLNTQQSSLGKDLQQSLLGFLEVALKLKKERLKKGFNFNSFENKLYLNEEGRIEKIETEKESGAHTLIEEAMLLANQSSARLLDGHFHNRGIYRTHKEPSLEQQKRLYDKLFDYEIVRPKNMGFFPFLEHALKISQEKSIEREVSRLIIKSQNLALYSPMQESHFGLGFASYTHFTSPIRRYSDLALHRLLKELLFHQAKGCSYLLEETPELCAELNALQKKAALIERDFIKRKFARLALEFLEKEFLGVVLEAKDWVVVGLKEFIGLKVLIKTNKVFKPLEKVRIKITHADLILGQVRGEITERIKEHVS

SEQ ID NO: 8441 - protein, 66 aa, Helicobacter pylori
  misc_feature (B) LOCATION 1...66
  hypothetical: YES
NHQGGNMKNLVILSGAGISAESGIKTFRDAGGLWEGHDIMEVASPYGWKEPPKGVGFLQPKAPAAF

SEQ ID NO: 8442 - protein, 163 aa, Helicobacter pylori
  misc_feature (B) LOCATION 1...163
  hypothetical: YES
RNWKNTIKLISITQNVDDLHERAGSSRILHLHGELLSVRSEKDPNLVYRWEKDLNLGDLAQDKAQLRPGIVWFGEEVPLLKEAVSLVKQVHLLIIIGTSLQVYPAASLYTHANKDALICYIDPKAENARLPQNVQCINENAVHAMQDLMPKIHRYSPLKKMLK

SEQ ID NO: 8443 - protein, 243 aa, Helicobacter pylori
  misc_feature (B) LOCATION 1...243
  hypothetical: YES
MKNLVILSGAGISAESGIKTFRDAGGLWEGHDIMEVASPYGWKKNPQKVLDFYNQRRRQLFEVYPNKAHKALAELEKHYQVNIITQNVDDLHERAGSSRILHLHGELLSVRSEKDPNLVYRWEKDLNLGDLAQDKAQLRPDIVWFGEEVPLLKEAVSLVKQVHLLIIIGTSLQVYPAASLYTHANKDALIYYIDPKAKNARLPQNVQCINENAVHAMQDLMPKLIEMASSRDVKIIFIFSAND

SEQ ID NO: 8444 - protein, 60 aa, Helicobacter pylori
  misc_feature (B) LOCATION 1...60
  hypothetical: YES
KKKARAQQQESFEREKELMEEEFQVQRELLEIYYGYPTQKNKPGIKYDDTIDIEPEDEKD

SEQ ID NO: 8445 - protein, 66 aa, Helicobacter pylori
  misc_feature (B) LOCATION 1...66
  hypothetical: YES
EKDTITRRMKIAHNSLPETDRKAHMKPKWRELADIRSKMFAESKKQLKERGIQLKEKSKGATTRIF

SEQ ID NO: 8446 - protein, 123 aa, Helicobacter pylori
  misc_feature (B) LOCATION 1...123
  hypothetical: YES
MNTNNHNNEKKNTITRRMKIAHNSLPETDRKAHMEPKWRELADIRSKMFAESKKQLKERGIQLKEKSKAQQQESFEREKELMEEEFQVQRELLEIYYGYPTQKNKPGIKYDDTIDIEPEDEKD

SEQ ID NO: 8447 - protein, 76 aa, Helicobacter pylori
  misc_feature (B) LOCATION 1...76
  hypothetical: YES
MKRFDLRPLKADIFERLEELIEKEMQPNEVAIFMFEVGDFSNIPKSAEFIQSKGHELLNSLRFNQADWTIVVRKKA

SEQ ID NO: 8448 - protein, 76 aa, Helicobacter pylori; identical to SEQ ID NO: 8447
  misc_feature (B) LOCATION 1...76
  hypothetical: YES

SEQ ID NO: 8449 - protein, 339 aa, Helicobacter pylori
  misc_feature (B) LOCATION 1...339
  hypothetical: YES
LDDCREKKGLILSGFNPLNSPLSASSSISLKEAYCLEKLSLQKGFKINYKLSEDSLNLLEKSDLCVLFGGFSNACLNENERWILESINQSKRPYALLRPLQDTRDLQENCLFASYEIHTEAAILALILRGILEQTSQLKGHVLEKIDVGYLSSEANMSEEELQELIALIVKAKKRVLVLNREITKHANNAFLYTLLSGLQNYLEILHIPCNDSNPTVAFYDSKDQEWLLETAFKEGILPFESQLQSKDLELLERMGEANGSFVYVSYKSLKTPKLSFSKQFKIANKIKHSKAKFQILNQTLECELEESPHLKGLIAILEGAFFDTYPYIPILSHSQGIS

SEQ ID NO: 8450 - protein, 350 aa, Helicobacter pylori
  misc_feature (B) LOCATION 1...350
  hypothetical: YES
APQFFAFQSSGLDDCREKKGLILSGFNPLNSPLSASSSISLKEAYCLEKLSLQKGFKINYKLSEDSLNLLEKSDLCVLFGGFSNACLNENERWILESINQSKRPYALLRPLQDTRDLQENCLFASYEIHTEAAILALILRGILEQTSQLKGHVLEKIDVGYLSSEANMSEEELQELIALIVKAKKRVLVLNREITKHANNAFLYTLLSGLQNYLEILHIPCNDSNPTVAFYDSKDQEWLLETAFKEGILPFESQLQSKDLELLERMGEANGSFVYVSYKSLKTPKLSFSKQFKIANKIKHSKAKFQILNQTLECELEESPHLKGLIAILEGAFFDTYPYIPILSHSQGIS

SEQ ID NO: 8451 - protein, 82 aa, Helicobacter pylori
  misc_feature (B) LOCATION 1...82
  hypothetical: YES
KRGFSLKKGVSKKRVQKRNPLKKEAPLKQRKFKTKKVQNKESSKQEVQKKKFKKRKFKQMIQNKESSKQRVSKRKGSKKETP

SEQ ID NO: 8452 - protein, 109 aa, Helicobacter pylori
  misc_feature (B) LOCATION 1...109
  hypothetical: YES
KDFSSTLPKKREFRKGVQKKKDFSSNPPKKQRELKEREFKTKGSKKRVQKFKEKGFKKGGSPLKREFQKKGFQKRNPLKKEAPLKQRKFKTKKVQNKESSKKEVQKKKV

SEQ ID NO: 8453 - protein, 156 aa, Helicobacter pylori
  misc_feature (B) LOCATION 1...156
  hypothetical: YES
IKYARKIMRLKLTHITHISHKIANDFIHSKLLELKAPRELLCELIEGILEKSVKKENAIDEQARELLEENTDEIEFMRMDERQLFWMIKRQIAQKEGFHLFWEERCSDLSHQILNKILDEDLIMFSVSENLIRNLIYKSIDTYSKAYESIENEVHE

SEQ ID NO: 8454 - protein, 183 aa, Helicobacter pylori
  misc_feature (B) LOCATION 1...183
  hypothetical: YES
MRLKLTHITHISHKIANDFIHSKLLELKAPRELLCELIEGILEKSVKKENAIDEQARELLEENTDEIEFMRMDERQLFWMIKRQIAQKEGFHLFWEERCSDLSHQILNKILDEDLIMFSVSENLIRNLIYKSIDTYSKAYESIENEVHEKIKHYKRKLPVGSDEYELVFERLYEEELRRKGFL

SEQ ID NO: 8455 - protein, 93 aa, Helicobacter pylori
  misc_feature (B) LOCATION 1...93
  hypothetical: YES
RVKALDSTLKHLAIIMDGNGRWAKLKNKARAYGHKKGVKTLKDITIWCANHKLECLTLYAFSTENWKRPKSEVDFLMKMLKKYLKDERSTLLG

SEQ ID NO: 8456 - protein, 161 aa, Helicobacter pylori
  misc_feature (B) LOCATION 1...161
  hypothetical: YES
KCLKNTLKMSDPLYLDNNIRFRAIGDLEGFSKELRDTILRLENDTRYFKDFTQVLALNYGSKNELSRAFKSLLENPPNHINNIESLENEISHRLDTHDLPEVDLLLRTGGEMRLSNFLLWQSSYAELFFTPILWPDFTPKDLENIISDFYKRVRKFGELKC

SEQ ID NO: 8457 - protein, 234 aa, Helicobacter pylori
  misc_feature (B) LOCATION 1...234
  hypothetical: YES
LDSTLKHLAIIMDGNGRWAKLKNKARAYGHKKGVKTLKDITIWCANHKLECLTLYAFSTENWKRPKSEVDFLMKMLKKYLKDERSTYLDNNIRFRAIGDLEGFSKELRDTILRLENDTRYFKDFTQVLALNYGSKNELSRAFKSLLENPPNHINNIESLENEISHRLDTHDLPEVDLLLRTGGEMRLSNFLLWQSSYAELFFTPILWPDFTPKDLENIISDFYKRVRKFGELKC

SEQ ID NO: 8458 - protein, 228 aa, Helicobacter pylori
  misc_feature (B) LOCATION 1...228
  hypothetical: YES
MLVEIENLTKTYGSLKALDNISLKLPKQQFIGLLGPNGAGKTTLLKILAGLNLNYQGEVKILNQKIGIETKKSVAFLSDGDFLDPKLTPLKAIAFYKDFFSDFDESKALNLLKRFSVPLKREFKALSKGMREKLQLILTLSRNASLYLFDEPVAGIDPIAREEIFELIAKEFSQNASLLVSTHLVVDVEKYLDSAIFLKEAKVVAFGDVGELKKGYSSLEAAYKERLK

SEQ ID NO: 8459 - protein, 228 aa, Helicobacter pylori; identical to SEQ ID NO: 8458
  misc_feature (B) LOCATION 1...228
  hypothetical: YES

SEQ ID NO: 8460 - protein, 241 aa, Helicobacter pylori
  misc_feature (B) LOCATION 1...241
  hypothetical: YES
RFLQKSAQIWGIKMLVEIENLTKTYGSLKALDNISLKLPKQQFIGLLGPNGAGKTTLLKILAGLNLNYQGEVKILNQKIGIETKKSVAFLSDGDFLDPKLTPLKAIAFYKDFFSDFDESKALNLLKRFSVPLKREFKALSKGMREKLQLILTLSRNASLYLFDEPVAGIDPIAREEIFELIAKEFSQNASLLVSTHLVVDVEKYLDSAIFLKEAKVVAFGDVGELKKGYSSLEAAYKERLK

SEQ ID NO: 8461 - protein, 193 aa, Helicobacter pylori
  misc_feature (B) LOCATION 1...193
  hypothetical: YES
MALEVVLWDFDGVIFDSMHLKYEGFKALFQKHGNDSKEGLKQFEVYHYQSGGISRNEKIQYFYNEILKTPIAQEEIDALALEFGAIIEQKLFDRGHLNSEVMAFIDKHYQNYIFHIASAALHSELQVLCEFLGITKYFKSVEGSPPDKPKIIANIIQKYAYDPSRMLMIAIASMIMKALRLIKWRFWAITARF

SEQ ID NO: 8462 - protein, 222 aa, Helicobacter pylori
  misc_feature (B) LOCATION 1...222
  hypothetical: YES
MALEVVLWDFDGVIFDSMHLKYEGFKALFQKHGNDSKEGLKQFEVYHYQSGGISRNEKIQYFYNEILKTPIAQEEIDALALEFGAIIEQKLFDRGHLNSEVMAFIDKHYQNYIFHIASAALHSELQVLCEFLGITKYFKSVEGSPPDKPKIIANIIQKYAYDPSRMLMIGDSVNDYESAKANKVAFLGYNSKVLKNLVGQDGYQGKYLESFKGFDLQNFAKE

SEQ ID NO: 8463 - protein, 229 aa, Helicobacter pylori
  misc_feature (B) LOCATION 1...229
  hypothetical: YES
AYKKGEIMALEVVLWDFDGVIFDSMHLKYEGFKALFQKHGNDSKEGLKQFEVYHYQSGGISRNEKIQYFYNEILKTPIAQEEIDALALEFGAIIEQKLFDRGHLNSEVMAFIDKHYQNYIFHIASAALHSELQVLCEFLGITKYFKSVEGSPPDKPKIIANIIQKYAYDPSRMLMIGDSVNDYESAKANKVAFLGYNSKVLKNLVGQDGYQGKYLESFKGFDLQNFAKE

SEQ ID NO: 8464 - protein, 76 aa, Helicobacter pylori
  misc_feature (B) LOCATION 1...76
  hypothetical: YES
MFHEFRDEISVLKANNPHFDKIFEKHNQLDDDIKTAEQQNASDAEISHMKKQKLKLKDEIHSMIIEYREKQKSERA

SEQ ID NO: 8465 - protein, 92 aa, Helicobacter pylori
  misc_feature (B) LOCATION 1...92
  hypothetical: YES
KDSLLYFKHPKLKEKTMFHEFRDEISVLKANNPHFDKIFEKHNQLDDDIKTAEQQNASDAEISHMKKQKLKLKDEIHSMIIEYREKQKSERA

SEQ ID NO: 8466 - protein, 86 aa, Helicobacter pylori
  misc_feature (B) LOCATION 1...86
  hypothetical: YES
NLACGVSIRSMKNFYDWIKEFVRDQGEFIVQQSGWLELERSSYAKLIAQTISHVLNGGSLLVSADSSRRWFLNYILSNLNPKDLKE

SEQ ID NO: 8467 - protein, 87 aa, Helicobacter pylori
  misc_feature (B) LOCATION 1...87
  hypothetical: YES
NLACGVSIRSMKNFYDWIKEFVRDQGEFIVQQSGWLELERSSYAKLIAQTISHVLNGGSLLVSADSSRRWFLNYILSNLNPKDLKER

SEQ ID NO: 8468 - protein, 169 aa, Helicobacter pylori
  misc_feature (B) LOCATION 1...169
  hypothetical: YES
VRDQGEFIAQQSGWLELERSSYAKLIAQTISHVLNGGSLLVSADSSRRWFLNYILSNLNPKDLKERPLLSVIDFNASSFYPKNDANLSLATIELTYQNPMFWHVGRVENEGLKTLLLSKIPSFLWLFEELKEDCLLLKEHDSLLDYKLLQLFKLFENALFSALYNKVAL

SEQ ID NO: 8469 - protein, 75 aa, Helicobacter pylori
  misc_feature (B) LOCATION 1...75
  hypothetical: YES
MLHKKYRPNVAAIIMSPDYPNTCEVFIAERIDIEGAWQFPQGGIDEGETPLEALYRELLEEIGTNEIEILAQYPR

SEQ ID NO: 8470 - protein, 157 aa, Helicobacter pylori
  misc_feature (B) LOCATION 1...157
  hypothetical: YES
MLHKKYRPNVAAIIMSPDYPNTCEVFIAERIDIEGAWQFPQGGIDEGETPLEALYRELLEEIGTNEIEILAQYPRWIAYDFPSNMEHKFYSFDGQKQRYFLVRLKHVNNIDLNKHTPEFRSYQFIQLKDLLKKIVPFKRQVYRQVIAYFRKEGYLGC

SEQ ID NO: 8471 - protein, 159 aa, Helicobacter pylori
  misc_feature (B) LOCATION 1...159
  hypothetical: YES
RPMLHKKYRPNVAAIIMSPDYPNTCEVFIAERIDIEGAWQFPQGGIDEGETPLEALYRELLEEIGTNEIEILAQYPRWIAYDFPSNMEHKFYSFDGQKQRYFLVRLKHVNNIDLNKHTPEFRSYQFIQLKDLLKKIVPFKRQVYRQVIAYFRKEGYLGC

SEQ ID NO: 8472 - protein, 179 aa, Helicobacter pylori
  misc_feature (B) LOCATION 1...179
  hypothetical: YES
DDRFLFNARYFRNYTQYVKRYDLRNQNIYGFEFLSSSRDTLQKYFHLKSNIDNGHYIDFLYMNDLDYVRFEKVNKRITDATHMSRANYYLQTENNYYGLNIKYFLNLNKINNNRTFQSVPNLQYHKYLNSLYFRNLLYSVDYQFRNTAREIGYGYVQNALNVPVGLQFSLFKKYLSLGL

SEQ ID NO: 8473 - protein, 320 aa, Helicobacter pylori
  misc_feature (B) LOCATION 1...320
  hypothetical: YES
NDLQLFNVALMQSKNSFVPTIPNESREFGNFVSSNLTMYVNTDLAREYNKLFHTIQLEAIFNIPYYTFKNGLFSQNMYALSTQALNSYTSPLLRDYDYQGRLYDSVWNPNSILPSDASNKTVNLTLTQYLYGLGGQELLYFKISQLINLDDKVSPFKMPLESKIGFSPLTGLNIFGNVFYSFYQNRLEEISVNANYQRKFLSFNLSYFLRNNFSSGINSIVENPADYLKAGFSNDFGYFSMSADVGYDIRNNVVLNWNVGIYKKIRCFGIGFQFVNQRRPILTGDPNQPIRVFENNYVKLELDFSPITKTNVTYRSLQRK

SEQ ID NO: 8474 - protein, 508 aa, Helicobacter pylori
  misc_feature (B) LOCATION 1...508
  hypothetical: YES
LKRATSTLRRRFLFNARYFRNYTQYVKRYDLRNQNIYGFEFLSSSRDTLQKYFHLKSNIDNGHYIDFLYMNDLDYVRFEKVNKRITDATHMSRANYYLQTENNYYGLNIKYFLNLNKINNNRTFQSVPNLQYHKYLNSLYFRNLLYSVDYQFRNTAREIGYGYVQNALNVPVGLQFSLFKKYLSLGLWNDLQLSNVALMQSKNSFVPTIPNESREFGNFVSSNFSMYVNTDLAREYNKLFHTIQLEAIFNIPYYTFKNGLFSQNMYALSTQALNSYTSPLLRDYDYQGRLYDSVWNPNSILPSDASNKTVNLTLTQYLYGLGGQELLYFKISQLINLDDKVSPFKMPLESKIGFSPLTGLNIFGNVFYSFYQNRLEEISVNANYQRKFLSFNLSYFLRNNFSSGINSIVENPADYLKAGFSNDFGYFSMSADVGYDIRNNVVLNWNVGIYKKIRCFGIGFQFVNQRRPILTGDPNQPIRVFENNYVKLELDFSPITKTNVTYRSLQRK

SEQ ID NO: 8475 - protein, 153 aa, Helicobacter pylori
  misc_feature (B) LOCATION 1...153
  hypothetical: YES
MAVSSINQFDSNLYGLLNAKSAPKEDLAPIEGAEKIEREKKDAPTENLPFNPDKRETYGFLVLELMSDREYEAFLRATAGMDESQKRLAAQSLYSLTDFYNGKFSKEVENAPKQPVNGLHKKAFQTFNATNHNAFLQRYQNAYNNPSSMDVVL

SEQ ID NO: 8476 - protein, 156 aa, Helicobacter pylori
  misc_feature (B) LOCATION 1...156
  hypothetical: YES
EIHLAVSSINHCDSTLYGLLNAKSAPKEDLAPIEGAEKIEREKKDAPTENLPFNPDKRETYGFLVLELMSDREYEAFLRATAGMDESQKRLAAQSLYSLTDFYNGKFSKEVENAPKQPVNGLHKKAFQTFNATNHNAFLQRYQNAYNNPSSMDVVL

SEQ ID NO: 8477 - protein, 112 aa, Helicobacter pylori
  misc_feature (B) LOCATION 1...112
  hypothetical: YES
MLEDYAISLEEVNFNDFIVVDVRELDEYEELHLPNATLISVNDQEKLADFLSQHKDQKVLLHCRAGRRALDAAKSMHELGYTPYYLEGNVYDFEKYGFRMVYDDTSLSDKKN

SEQ ID NO: 8478 - protein, 117 aa, Helicobacter pylori
  misc_feature (B) LOCATION 1...117
  hypothetical: YES
KLRINMLEDYAISLEEVNFNDFIVVDVRELDEYEELHLPNATLISVNDQEKLADFLSQHKDQKVLLHCRAGRRALDAAKSMHELGYTPYYLEGNVYDFEKYGFRMVYDDTSLSDKKN

SEQ ID NO: 8479 - protein, 82 aa, Helicobacter pylori
  misc_feature (B) LOCATION 1...82
  hypothetical: YES
MGLVSQYKECKKAHALKRSLNKNATNKLSIKNAKMRQYKGHKRIFSRTRSVSMISVSSFSKFGERIQNKQDKPPSFVLNFNL

SEQ ID NO: 8480 - protein, 82 aa, Helicobacter pylori; identical to SEQ ID NO: 8479
  misc_feature (B) LOCATION 1...82
  hypothetical: YES

SEQ ID NO: 8481 - protein, 59 aa, Helicobacter pylori
  misc_feature (B) LOCATION 1...59
  hypothetical: YES
MAVVIKVVNGKIQEYENGNYKRTYDSNIVAADTDGHIVAAVTAKGKVEEYKNGIHKRTY

SEQ ID NO: 8482 - protein, 78 aa, Helicobacter pylori
  misc_feature (B) LOCATION 1...78
  hypothetical: YES
TRLVVWRWVYHNLYFRRFIMAVVIKVVNGKIQEYENGNYKRTYDSNIVAADTDGHIVAAVTAKGKVEEYKNGIHKRTY

SEQ ID NO: 8483 - protein, 78 aa, Helicobacter pylori
  misc_feature (B) LOCATION 1...78
  hypothetical: YES
KGFFINPPQKRENLRKGVQKKKDFSSNPPKKQRELKEREFKTKGSKKRVQKFKEKGFKKGGSPLKREFQKKGFKKETP

SEQ ID NO: 8484 - protein, 78 aa, Helicobacter pylori; identical to SEQ ID NO: 8483
  misc_feature (B) LOCATION 1...78
  hypothetical: YES

SEQ ID NO: 8485 - protein, 154 aa, Helicobacter pylori
  misc_feature (B) LOCATION 1...154
  hypothetical: YES
VWYEVKHFTFNETRGAFDNFDGKIDLEPNTKVLSVFEGNIDLKSVNTRDRKRDNHLKTADFFDVVKYPKGSFKMTKYEDGKIHGDLTLRGVTKPVVLEAKIQAPLQNPMNKKEFMVLQAEGKINRKDFGIGKTFSNAVVGDEVKIEIKLEAYAQ

SEQ ID NO: 8486 - protein, 169 aa, Helicobacter pylori
  misc_feature (B) LOCATION 1...169
  hypothetical: YES
LAWATPYTIDKANSSVWYEVKHFTFNETRGAFDNFDGKIDLEPNTKVLSVFEGNIDLKSVNTRDRKRDNHLKTADFFDVVKYPKGSFKMTKYEDGKIHGDLTLRGVTKPVVLEAKIQAPLQNPMNKKEFMVLQAEGKINRKDFGIGKTFSNAVVGDEVKIEIKLEAYAQ

SEQ ID NO: 8487 - protein, 180 aa, Helicobacter pylori
  misc_feature (B) LOCATION 1...180
  hypothetical: YES
RTLIVTVRASVWRGRHLIRLYKANSSVWFEVKHFTFNETRGAFDNFDGKIDLEPNTKVLSVFEGNIDVKSVNTRDRKRDNHLKTADFFDVVKYPKGSFKMTKYEDGKIHGDLTLRGVTKPVVLEAKIQAPLQNPMNKKEFMVLQAEGKINRKDFGIGKTFSNAVVGDEVKIEIKLEAYAQ

SEQ ID NO: 8488 - protein, 139 aa, Helicobacter pylori
  misc_feature (B) LOCATION 1...139
  hypothetical: YES
LNNEMSIHNHYIREFQITQKELQNACPTLANKSYTSYMLAEGFKGSIKEVAVAVLACGWSYLVIAQNLSQIPNALEDAFYGHLIKGYSSKEFQACVTWNINLLDSFALAFSKQEIEKLKEIFIATSEYEYQFWDMAYQS

SEQ ID NO: 8489 - protein, 196 aa, Helicobacter pylori
  misc_feature (B) LOCATION 1...196
  hypothetical: YES
MILKNAIALTGGIGTGKSTTLKILESQGYKILDADKIAHQLLQEHRLEIAQRFGSDILEKDILNRKKLGAIVFQNANELKWLEDFLHPLIRECMLKKACELEKNHQAYFLDIPLFFEVGGKKRYPVSRVVLIYAPRALQIERLLERDKLKEAEILQRLACQMDIEQKRAMSDYIIDNSSSLKDLNKQVERFLKTLL

SEQ ID NO: 8490 - protein, 225 aa, Helicobacter pylori
  misc_feature (B) LOCATION 1...225
  hypothetical: YES
DTITKTFIGPHSLCLKIYKKSLKTISNLKMILKNAIALTGGIGTGKSTTLKILESQGYKILDADKIAHQLLQEHRLEIAQRFGSDILEKDILNRKKLGAIVFQNANELKWLEDFLHPLIRECMLKKACELEKNHQAYFLDIPLFFEVGGKKRYPVSRVVLIYAPRALQIERLLERDKLKEAEILQRLACQMDIEQKRAMSDYIIDNSSSLKDLNKQVERFLKTLL

SEQ ID NO: 8491 - protein, 101 aa, Helicobacter pylori
  misc_feature (B) LOCATION 1...101
  hypothetical: YES
IFCKAKHMITLKQALSLSQDELETLKNEIDAKVRASDLNAYIKAPSLNGASAKGVPILIKDNISVKGWEITCSSKILEGYVAPYHASAIENLHQNGMAGFG

SEQ ID NO: 8492 - protein, 107 aa, Helicobacter pylori
  misc_feature (B) LOCATION 1...107
  hypothetical: YES
MITLKQALSLSQDELETLKNEIDAKVRASDLNAYIKAPSLNGASAKGVPILIKDNISVKGWEITCSSKILEGYVAPYHASAIENLHQNGMAGFGLSNMDEFANWKHH

SEQ ID NO: 8493 - protein, 247 aa, Helicobacter pylori
  misc_feature (B) LOCATION 1...247
  hypothetical: YES
MITLKQALSLSQDELETLKNEIDAKVRASDLNAYIKAPSLNGASAKGVPILIKDNISVKGWEITCSSKILEGYVAPYHASAIENLHQNGMAGFGLSNMDEFAMGSTTESSCYGITKNPRDKNIVPGGSSGGSAAAVAGGLTVAALGSDTGGSIRQPASYCGCVGLKPTYGRVSRYGVIAYRSSFDQIRPITQNVEDASILFDAISGYDSKDSTSANLKPTHTFINLIRDKRFKIAILRDHINDASND

SEQ ID NO: 8494 - protein, 136 aa, Helicobacter pylori
  misc_feature (B) LOCATION 1...136
  hypothetical: YES
ELSNENLIAFSKKFDTLPIKLVSFELKKEISVHNCRECYFQAISNSSWANEGYLVGRHIDTHNPQLMDLLKRLHASFGIGVIDLRTDEDKSAILLNAKHKEKIDYTVALELSAKNEKFSGFLKSVVDYDSKLPTPL

SEQ ID NO: 8495 - protein, 135 aa, Helicobacter pylori
  misc_feature (B) LOCATION 1...135
  hypothetical: YES
LSNENLIAFSKKFDTLPIKLVSFELKKEISVHNCRECYFQAISNSSWANEGYLVGRHIDTHNPQLMDLLKRLHASFGIGVIDLRTDEDKSAILLNAKHKEKIDYTVALELSAKNEKFSGFLKSVVDYDSKLPTPL

SEQ ID NO: 8496 - protein, 313 aa, Helicobacter pylori
  misc_feature (B) LOCATION 1...313
  hypothetical: YES
MKPQDIEIIQSVLEAIKEPIKVTEIYDKAKELFEKGEIESMFDYGGETPHQSVSAAIYTALNKGEELPFLKVQEKPVLIALKGAAKEPVLNIEKPGVSSVKIVHNKIMHERDLHPFLTYMAYYNENLKCYTKTIFHEESSKSPKGMDRWLYPDMVGVRFLHAELSNENLIAFSKKFDTLPIKLVSFELKKEISVHNCRECYFQAISNSSWANEGYLVGRHIDTHNPQLMDLLKRLHASFGIGVIDLRTDEDKSAILLNAKHKEKIDYTVALELSAKNEKFSGFLKSVVDYDPNHPHRYKDEFDEIKKKEELYP

SEQ ID NO: 8497 - protein, 207 aa, Helicobacter pylori
  misc_feature (B) LOCATION 1...207
  hypothetical: YES
MNKIERLLQTLAPKGVGFRKLGEVCESTNKKTLKISEVSEVKNKGMYPVINSGRELYGYYHDFNNDGENITIASRGEYAGFINYFNEKFFAGGLCYPYKVKDTNELLTKFLYFYLKTNETQIMENLVFRGSIPALNKADIETLTIPIPPLEIQQEIVTILDQFSALTTDLQAGIPAEIKARKKQYEYYREKLLAFKPLTPLNNKELA

SEQ ID NO: 8498 - protein, 213 aa, Helicobacter pylori
  misc_feature (B) LOCATION 1...213
  hypothetical: YES
KFKGGKMNKIERLLQTLAPKGVGFRKLGEVCESTNKKTLKISEVSEVKNKGMYPVINSGRELYGYYHDFNNDGENITIASRGEYAGFINYFNEKFFAGGLCYPYKVKDTNELLTKFLYFYLKTNETQIMENLVFRGSIPALNKADIETLTIPIPPLEIQQEIVTILDQFSALTTDLQAGIPAEIKARKKQYEYYREKLLAFKPLTPLNNKELA

SEQ ID NO: 8499 - protein, 231 aa, Helicobacter pylori
  misc_feature (B) LOCATION 1...231
  hypothetical: YES
MFGNKQLQLQISQKDSEIAELKKEVNLYQSLLNLCLHEGFVGIKNNKVVFKSGNLASLNNLEEQSVHFKENAESVNLQGVSYSLKSQNIDGVQYFSLAKKTGGVGEYHKNDLFKTFCTSLKEGLENAQESMQYFHQETGLLLNAAKNGEEHSNEGLITVNKTGQDIESLYEKMQNATSLADSLNQRSNEITQVISLIDDIAEQTNLLALNAAIEAARAVNMAEGLRWWLMR

SEQ ID NO: 8500 - protein, 433 aa, Helicobacter pylori
  misc_feature (B) LOCATION 1...433
  hypothetical: YES
MFGNKQLQLQISQKDSEIAELKKEVNLYQSLLNLCLHEGFVGIKNNKVVFKSGNLASLNNLEEQSVHFKENAESVNLQGVSYSLKSQNIDGVQYFSLAKKTGGVGEYHKNDLFKTFCTSLKEGLENAQESMQYFHQETGLLLNAAKNGEEHSNEGLITVNKTGQDIESLYEKMQNATSLADSLNQRSNEITQVISLIDDIAEQTNLLALNAAIEAARAGEHGRGFAVVADEVRKLAEKTQKATKEIAVVVKSMQQEANDIQTNTHDINSIVGSIKGDVEELKSTVKNNMIVAQAAKYTIYNINNRVFCGLAKLDHVVFKNNLYGMVFGLNSFDITSHKSCRLGKWYYEGAGKENFANTSGYRALESHHASVHAEANDLVKAVQEDHVTDSKYLEHKVHLMEDSAKHVKENIDKMFYEKQDELNKIIEKIQKGE

SEQ ID NO: 8501 - protein, 438 aa, Helicobacter pylori
  misc_feature (B) LOCATION 1...438
  hypothetical: YES
IRNATMFGNKQLQLQISQKDSEIAELKKEVNLYQSLLNLCLHEGFVGIKNNKVVFKSGNLASLNNLEEQSVHFKENAESVNLQGVSYSLKSQNIDGVQYFSLAKKTGGVGEYHKNDLFKTFCTSLKEGLENAQESMQYFHQETGLLLNAAKNGEEHSNEGLITVNKTGQDIESLYEKMQNATSLADSLNQRSNEITQVISLIDDIAEQTNLLALNAAIEAARAGEHGRGFAVVADEVRKLAEKTQKATKEIAVVVKSMQQEANDIQTNTHDINSIVGSIKGDVEELKSTVKNNMIVAQAAKYTIYNINNRVFCGLAKLDHVVFKNNLYGMVFGLNSFDITSHKSCRLGKWYYEGAGKENFANTSGYRALESHHASVHAEANDLVKAVQEDHVTDSKYLEHKVHLMEDSAKHVKENIDKMFYEKQDELNKIIEKIQKGE

SEQ ID NO: 8502 - protein, 49 aa, Helicobacter pylori
  misc_feature (B) LOCATION 1...49
  hypothetical: YES
ISMTMSLIYENITDDRADTIFYLNGLNTWNYTQARFAQTYVREKQRFSL

SEQ ID NO: 8503 - protein, 104 aa, Helicobacter pylori
  misc_feature (B) LOCATION 1...104
  hypothetical: YES
LNTWNYTQARFAQTYGGKNSALVFNATTPWANGAIPKSNSTVRFGGYEGVNWGKTGYITGTFTADRVYITGNMMSGNGAQTGGGATLNFVGATKLISLEPLLKT

SEQ ID NO: 8504 - protein, 189 aa, Helicobacter pylori
  misc_feature (B) LOCATION 1...189
  hypothetical: YES
TLGITRKRDSLKPMCGKNSALVFNATTPWANGAIPKSNSTVRFGGYEGVNWGKTGYITGTFTADRVYITGNMMSGNGAQTGGGATLNFVGATEINSAGATFKNLKTTSQNSYMTFMALGNGSGSGKINVSQSDFYDWTDGGYDFTGNGVFDSVNFNKAYYKFQGAENSYNFKNTNFLSREFQIPGQDHH

SEQ ID NO: 8505 - protein, 78 aa, Helicobacter pylori
  misc_feature (B) LOCATION 1...78
  hypothetical: YES
MTLNEAIKDKTYEIVEIANCDEALKKRFLSFGIHEGVQCTLLHSSMKKATLSIKINRIQVALRSHEAQYLIIKESAQE

SEQ ID NO: 8506 - protein, 84 aa, Helicobacter pylori
  misc_feature (B) LOCATION 1...84
  hypothetical: YES
FKKEIKMTLNEAIKDKTYEIVEIANCDEALKKRFLSFGIHEGVQCTLLHSSMKKATLSIKINRIQVALRSHEAQYLIIKESAQE

SEQ ID NO: 8507 - protein, 96 aa, Helicobacter pylori
  misc_feature (B) LOCATION 1...96
  hypothetical: YES
AGNFKFQGKTTIEKSVLNDASYAFDGVNNAFNEDKFNGGSFNFNHAEQTNAFNNNSFSGGSFSFNAKQVDFNGNSFNGGVFNFNKSPKASFTNKHF

SEQ ID NO: 8508 - protein, 161 aa, Helicobacter pylori
  misc_feature (B) LOCATION 1...161
  hypothetical: YES
MTFMALGNGSGSGKINVSQSDFYDWTDGGYDFTGNGVFDSVNFNKAYYKFQGAENSYNFKNTNFLAGNFKFQGKTTIEKSVLNDASYAFDGVNNAFNEDKFNGGSFNFNHAEQTNAFNNNSFSGGSFSFNAKQVDFNGNSFNGGVFNFNNTPKASFTNEHF

SEQ ID NO: 8509 - protein, 93 aa, Helicobacter pylori
  misc_feature (B) LOCATION 1...93
  hypothetical: YES
RSLSDFTEQQLIFAKKQYQRYSKIGGAVDKNTLESYEFTYRRLESDYAYSIAVLNKTILRAPFDGVIASKNIQVGEGVSANNTVLLRLVSHAR

SEQ ID NO: 8510 - protein, 234 aa, Helicobacter pylori
  misc_feature (B) LOCATION 1...234
  hypothetical: YES
MIRKILIGLFLSFLSMEAGERVYAIFNVKAMQDSKLTLDSTGIVDSIKVTEGSVVKKGDVLLLLYNQDKQAQSDSTEQQLIFAKKQYQRYSKIGGAVDKNTLESYEFTYRRLESDYAYSIAVLNKTILRAPFDGVIASKNIQVGEGVSANNTVLLRLVSHARKLVIEFDSKYINAVKVGDTYTYSIDGDSNQHEAKITKIYPTVDENTRKVSAEALLSKPMAVGLFGDGFIQTK

SEQ ID NO: 8511 - protein, 85 aa, Helicobacter pylori
  misc_feature (B) LOCATION 1...85
  hypothetical: YES
MLAAGLTLPEFGCYLSHYLLWKECVKLDQPVVILEDDVTLESHFMQALEDCLKSPFDFVRLYGCYWYYQRDKIPCFAQRICISSL

SEQ ID NO: 8512 - protein, 201 aa, Helicobacter pylori
  misc_feature (B) LOCATION 1...201
  hypothetical: YES
SVIGVYIISLKESQRRLDTEKLVLESNEKFKGRCVFQIFDAISPKHQDFEKLLQELYNAQSLLQSDWYHSYVGAGLTLPELGCYLSHYLLWKECVKLDQPVVILEDDVTLESHFMQALEDCLKSPFDFVRLYGCYWYYHETKFHVLPKEFVFPPFDHSFKNNPILEKFKKFFDVSRFLNLSTHKVIHLYSQKNTKKLLRNA

SEQ ID NO: 8513 - protein, 332 aa, Helicobacter pylori
  misc_feature (B) LOCATION 1...332
  hypothetical: YES
VIGVYIISLKESQRRLDTEKLVLESNEKFKGRCVFQIFDAISPKHQDFEKLLQELYNAQSLLQSDWYHSYVGAGLTLPELGCYLSHYLLWKECVKLDQPVVILEDDVTLESHFMQALEDCLKSPFDFVRLYGCYWYYHETKFHVLPKEFVFPPFDHSFKNNPILEKFKKFFDVSRFLNLSTHKVIHYILKKIQKSYYATHEKEAFFLEHFYLTSVYVASTAGYYLTPKGAKTFIEATESFKIIEPVDMFMDNSAYHDVANLTYVPCPVSLSEHSLDSTIQKPQKKSLKSYPLPPQKSTFKNLFYYSLNAKKRLNAFQQYSKQYAPLKTPKEV

SEQ ID NO: 8514 - protein, 79 aa, Helicobacter pylori
  misc_feature (B) LOCATION 1...79
  hypothetical: YES
KTAQSYGILVCATGIGMSMGANRFKGIRAALCLDAYMAKMTRLHNNANVLCLGEKISGIGVAESILEAFFSTEFEQGRH

SEQ ID NO: 8515 - protein, 138 aa, Helicobacter pylori
  misc_feature (B) LOCATION 1...138
  hypothetical: YES
MNKPLNTAQVFIGSDHAGLHLAEFVKHFLEDKRFKIQAFLPTTRVDYPDYAKLVCQKVLENAQSYGILVCATGIGMSMGANRFKGIRAALCLDAYMAKMTRLHNNANVLCLGEKISGIGVAESILEAFFSTEFEQGRH

SEQ ID NO: 8516 - protein, 151 aa, Helicobacter pylori
  misc_feature (B) LOCATION 1...151
  hypothetical: YES
MNKPLNTAQVFIGSDHAGLHLAEFVKHFLEDKRFKIQAFLPTTRVDYPDYAKLVCQKVLENAQSYGILVCATGIGMSMGANRFKGIRAALCLDAYMAKMTRLHNNANVLCLGEKISGIGVAESILEAFFSTEFEQGRHVLRIQKLDESLKS

SEQ ID NO: 8517 - protein, 133 aa, Helicobacter pylori
  misc_feature (B) LOCATION 1...133
  hypothetical: YES
VIGVYIISLKESQRRLDTEKLILESNEKFKGRCVFQIFDAISPKHQDFEKLLQELYDSSSLLKSDWFHSDYCYQELLPQEFGCYLSHYFLWKECVKSNQPVVILEDDVTLESHFMQALEDCLKSPFDFVRFYG

SEQ ID NO: 8518 - protein, 144 aa, Helicobacter pylori
  misc_feature (B) LOCATION 1...144
  hypothetical: YES
MVECQRIPYLGVHLTQVYIISLKESQRRLDTEKLILESNEKFKGRCVFQIFDAISPKHQDFEKLLQELYDSSSLLKSDWFHSDYCYQELLPQEFGCYLSHYFLWKECVKSNQPVVILEDDVTLESHFMQALEDCLKSPFDFVRF

SEQ ID NO: 8519 - protein, 67 aa, Helicobacter pylori
  misc_feature (B) LOCATION 1...67
  hypothetical: YES
MPENSKLQPAKLGKNFDPVDHSNRNFFFSLILSVLLHWLIYFLFEHREDFFPSKPKLVKLNPENLLV

SEQ ID NO: 8520 - protein, 99 aa, Helicobacter pylori
  misc_feature (B) LOCATION 1...99
  hypothetical: YES
AQPEKDFIRNNLRDIGRITQKYLEYPQVAAYLGQDGTNAVEFYLHPNGDITDLKIIIGSEYKMLDDNTLKTIQIAYKDYPRPKTKTLIRIRVRYYLGGN

SEQ ID NO: 8521 - protein, 228 aa, Helicobacter pylori
  misc_feature (B) LOCATION 1...228
  hypothetical: YES
MPENSKLQPAKLGKNFDPVDHSNRNFFFSLILSVLLHWLIYFLFEHREDFFPSKPKLVKLNPENLLVLKRGHSQDPSKNNPGAPKPTLAGPQKPPTPPTPPTPPTPPKPIEKPKPEPKPKPKPEPKKPNHKHKALKKVEKVEEKKVVEEKKEEKKVVEQKVEQKKIEEKKPVKKEFDPNQLSFLPKEVAPPRQENNKGLDNQTRRDIDELYGEEFGDLGTARKRFHQE

SEQ ID NO: 8522 - protein, 231 aa, Helicobacter pylori
  misc_feature (B) LOCATION 1...231
  hypothetical: YES
EIYMPENSKLQPAKLGKNFDPVDHSNRNFFFSLILSVLLHWLIYFLFEHREDFFPSKPKLVKLNPENLLVLKRGHSQDPSKNNPGAPKPTLAGPQKPPTPPTPPTPPTPPKPIEKPKPEPKPKPKPEPKKPNHKHKALKKVEKVEEKKVVEEKKEEKKVVEQKVEQKKIEEKKPVKKEFDPNQLSFLPKEVAPPRQENNKGLDNQTRRDIDELYGEEFGDLGTARKRFHQE

SEQ ID NO: 8523 - protein, 317 aa, Helicobacter pylori
  misc_feature (B) LOCATION 1...317
  hypothetical: YES
MPENSKLQPAKLGKNFDPVDHSNRNFFFSLILSVLLHWLIYFLFEHREDFFPSKPKLVKLNPENLLVLKRGHSQDPSKNNPGAPKPTLAGPQKPPTPPTPPTPPTPPKPIEKPKPEPKPKPKPEPKKPNHKHKALKKVEKVEEKKVVEEKKEEKKVVEQKVEQKKIEEKKPVKKEFDPNQLSFLPKEVAPPRQENNKGLDNQTRRDIDELYGEEFGDLGTAEKDFIRNNLRDIGRITQKYLEYPQVAAYLGQDGTNAVEFYLHPNGDITDLKIIIGSEYKMLDDNTLKTIQIAYKDYPRPKTKTLIRIRVRYYLGGN

SEQ ID NO: 8524 - protein, 110 aa, Helicobacter pylori
  misc_feature (B) LOCATION 1...110
  hypothetical: YES
MEHHKAHTTIQALQAKRKRLLTELAELEAEIKVSSERRSSFNVSLSPSLLAEIEEIEYEEKMSKERRIHHNLLLSPSFMAKVDEYMKEKGFPNRSLLFEKALEFYMLKHP

SEQ ID NO: 8525 - protein, 113 aa, Helicobacter pylori
  misc_feature (B) LOCATION 1...113
  hypothetical: YES
GVIMEHHKAHTTIQALQAKRKRLLTELAELEAEIKVSSERRSSFNVSLSPSLLAEIEEIEYEEKMSKERRIHHNLLLSPSFMAKVDEYMKEKGFPNRSLLFEKALEFYMLKHP

SEQ ID NO: 8526 - protein, 131 aa, Helicobacter pylori
  misc_feature (B) LOCATION 1...131
  hypothetical: YES
NGKIDLKERFSKNRSFKGIKKKIAKKYTIKNSLSIIYSLKTHSNSSLSINKKIFLGLGFVSALSAQSEDYNSSVYWLNSVNENNNNKSYYISPLRTWAGGNRSFTQNYNNSQLYIGTKNASATPNHSSVWF

SEQ ID NO: 8527 - protein, 130 aa, Helicobacter pylori
  misc_feature (B) LOCATION 1...130
  hypothetical: YES
GKIDLKERFSKNRSFKGIKKKIAKKYTIKNSLSIIYSLKTHSNSSLSINKKIFLGLGFVSALSAQSEDYNSSVYWLNSVNENNNNKSYYISPLRTWAGGNRSFTQNYNNSQLYIGTKNASATPNHSSVWF

SEQ ID NO: 8528 - protein, 133 aa, Helicobacter pylori
  misc_feature (B) LOCATION 1...133
  hypothetical: YES
GWELYWREHHFTNSNINHYKLNLNANSVTFNNSTLGSMPNGNANTIGNAYILNANNITFNNLTFNGGWFVFNRSDAHVNFQGTTTINNPTSPFVNMTGKVTINPNAIFNIQNYTPTIGNAYTLFSMKNGKYRL

SEQ ID NO: 8529 - protein, 491 aa, Helicobacter pylori
  misc_feature (B) LOCATION 1...491
  hypothetical: YES
MTYRNGKIDLKERFSKNRSFKGIKKKIAKKYTIKNSLSIIYSLKTHSNSSLSINKKIFLGLGFVSALSAQSEDYNSSVYWLNSVNENNNNKSYYISPLRTWAGGNRSFTQNYNNSQLYIGTKNASATPNHSSVWFGEKGYIGFITGVFKARDIFITGAVGSGNELKTGGGAILVFESSNELTTNGAYFQNNRAGTQTSWINLISNNSVNLTNTDFGNQTPNGGFNVMGRKITYNGGSVNGGNFGFDNVDSNGATTISGVTFNNNGALTYKGGNGIGGSITFTNSNINHYKLNLNANSVTFNNSTLGSMPNGNANTIGNAYILNANNITFNNLTFNGGWFVFNRSDAHVNFQGTTTINNPTSPFVNMTGKVTINPNAIFNIQNYTPTIGNAYTLFSMKNGNIAYDDVNNLWNIIRLKNTQATKDNSKNATSNNNTHTYYVTYNLGGTLYHFRQIFSPDSIVLQSVYYGANNLYYTNSVNIHDNVFNLKNITR

SEQ ID NO: 8530 - protein, 567 aa, Helicobacter pylori
  misc_feature (B) LOCATION 1...567
  hypothetical: YES
MKTTIKEIFQEEGYSIPNYQRDYAWKDKNFRDLWEDLEEAIEYNKKGYGHFIGTMVVAKNEDNKKLYDIIDGQQRTTTIFMLLHVLVSKQYEEDKRETRKYLYQKGELKLEVASQNQSFFKTLLEVAEKGNISHCEKDADTEGKQNLFEVLKAILDKISKLSEEEVNERLEVLLKMVLMRLEEPDPGKAIRTFQSVNDRGVPLLLLDKLKSLLIYYSNTFCDGKRGLDQFIIDHFGEIFKIFAKIKKSNHISSVGGPEFNEGDIFRYHAGSQRFDGIEFLGHYRTSTDNTYEKLKAELKEIKKSKLKSFIQSYVSDLKNFYQAFLDLLSEIDTNPTTLKVMLINRINPLFFNSLIRLKINNELDDETLKLFAKTDIVCFKSTRYMQSAAYNLINAYLRKGKEGLKSGMIAQCRNDIELAFRQSVNEAFNSSCFHYIFFEKNCQEMGLADLKKLIPGKQFSQEKEHIIPINLLDLDNEIEIQKLGFEDRKDLRAYIYTYGNLISLEKPLNIKGKDKDLYEKDEIYKSSEIPFNRRFNVKGFNKKVLITRNDEMQEWLIDTFFKDFATH

SEQ ID NO: 8531 - protein, 567 aa, Helicobacter pylori; identical to SEQ ID NO: 8530
  misc_feature (B) LOCATION 1...567
  hypothetical: YES

SEQ ID NO: 8532 - protein, 97 aa, Helicobacter pylori
  misc_feature (B) LOCATION 1...97
  hypothetical: YES
SGKFKTQPRDLEFALIDYGLEELEEVGDKIIIRGDYNSFKLLNEGFESLRLPIIKAGLQRIATTPIELNDEQMELTEKLLDRIEDDDDVVALYTNIE

SEQ ID NO: 8533 - protein, 153 aa, Helicobacter pylori
  misc_feature (B) LOCATION 1...153
  hypothetical: YES
MGRAFEYRRAAKEKRWDKMSKVFPKLAKAITLAAKEGGSEPDTNAKLRTAILNAKAQNMPKDNIDAAIKRASSKEGNLSEITYEGKANFGVLIIMECMTDNPTRTIANLKSYFNKTQGASIVPNGSLEFMFNRKSVFECLKSEVENLKLSLEI

SEQ ID NO: 8534 - protein, 240 aa, Helicobacter pylori
  misc_feature (B) LOCATION 1...240
  hypothetical: YES
MGRAFEYRRAAKEKRWDKMSKVFPKLAKAITLAAKEGGSEPDTNAKLRTAILNAKAQNMPKDNIDAAIKRASSKEGNLSEITYEGKANFGVLIIMECMTDNPTRTIANLKSYFNKTQGASIVPNGSLEFMFNRKSVFECLKSEVENLKLSLEDLEFALIDYGLEELEEVGDKIIIRGDYNSFKLLNEGFESLRLPIIKAGLQRIATTPIELNDEQMELTEKLLDRIEDDDDVVALYTNIE

SEQ ID NO: 8535 - protein, 406 aa, Helicobacter pylori
  misc_feature (B) LOCATION 1...406
  hypothetical: YES
MFNLKERCFTDNELNDNFVGIRSINNDLQICFPLGFDISDNKNIRADVKKLVSILLEYNKTIACENLLNNKNEIINSNFPLTAYKNVIEYFLSHGYYSENKSYYENNAKGRINFSKTIKKNRPIIQTFNNKNSFVYTRFQVKRKMINENELITAINKYCVHEAFSKFGFVFSSFMPPKFNLPTDKNYCIYLLENKLNNTFNDDKKILFQSMKNILLQDDNILDKTDFKFGTHHFYVVWERMIDRAFGIKNKEVYFPKTKWNLRCSNQNPDYLLQPDSIMLFDDKIYILDAKYYKYGISGVASDLPNSASIIKQIVYGEYAAKLETKKEVYNIFLMPFNRFNNPLKLGNIFENIGFANGEWRDNLKQYENIQGILIDTKFLMQNYNKKSNDLLKLLAKNVEETKNNF

SEQ ID NO: 8536 - protein, 411 aa, Helicobacter pylori
  misc_feature (B) LOCATION 1...411
  hypothetical: YES
KNFYSMFNLKERCFTDNELNDNFVGIRSINNDLQICFPLGFDISDNKNIRADVKKLVSILLEYNKTIACENLLNNKNEIINSNFPLTAYKNVIEYFLSHGYYSENKSYYENNAKGRINFSKTIKKNRPIIQTFNNKNSFVYTRFQVKRKMINENELITAINKYCVHEAFSKFGFVFSSFMPPKFNLPTDKNYCIYLLENKLNNTFNDDKKILFQSMKNILLQDDNILDKTDFKFGTHHFYVVWERMIDRAFGIKNKEVYFPKTKWNLRCSNQNPDYLLQPDSIMLFDDKIYILDAKYYKYGISGVASDLPNSASIIKQIVYGEYAAKLETKKEVYNIFLMPFNRFNNPLKLGNIFENIGFANGEWRDNLKQYENIQGILIDTKFLMQNYNKKSNDLLKLLAKNVEETKNNF

SEQ ID NO: 8537 - protein, 118 aa, Helicobacter pylori
  misc_feature (B) LOCATION 1...118
  hypothetical: YES
MQFEMRKIAFNAPKAFSLEHEGVVLEGEIVRVGAKLFRLKARLKGELMLICDTSGKEFKKSLDESLVLHISDGLWDTQSQSLDFDNLDVIESFNGFIDLSEILRSEVESIKLDYHYAD

SEQ ID NO: 8538 - protein, 120 aa, Helicobacter pylori
  misc_feature (B) LOCATION 1...120
  hypothetical: YES
LSMQFEMRKIAFNAPKAFSLEHEGVVLEGEIVRVGAKLFRLKARLKGELMLICDTSGKEFKKSLDESLVLHISDGLWDTQSQSLDFDNLDVIESFNGFIDLSEILRSEVESIKLDYHYAD

SEQ ID NO: 8539 - protein, 61 aa, Helicobacter pylori
  misc_feature (B) LOCATION 1...61
  hypothetical: YES
EFRKMAGRMELKNIISETLNEIEKMAKTIDDGFNTAQKTPSFFKTPSHCKTPQTLKMLTPL

SEQ ID NO: 8540 - protein, 127 aa, Helicobacter pylori
  misc_feature (B) LOCATION 1...127
  hypothetical: YES
YGAKNALFFQNTLSLQNTPNSKNANTPLEPKNAAKIETQEKITEEKEEAKEIITEEIVQENPTQALIPNERVFLKGLLERTLVLFKGMQALEEKEALKRLDLVARFLQYQLSVLEKRLESLERENTE

SEQ ID NO: 8541 - protein, 157 aa, Helicobacter pylori
  misc_feature (B) LOCATION 1...157
  hypothetical: YES
MAGRMELKNIISETLNEIEKMAKTIDDGFNTAQKTPSFFKTPSHLQNTPNSKNANTPLEPKNAAKIETQEKITEEKEEAKEIITEEIVQENPTQALIPNERVFLKGLLERTLVLFKGMQALEEKEALKRLDLVARFLQYQLSVLEKRLESLERENTE

SEQ ID NO: 8542 - protein, 287 aa, Helicobacter pylori
  misc_feature (B) LOCATION 1...287
  hypothetical: YES
LISVAHSPDADDIFMYYAIKFGWIDCPIKNKIFHNIALDIETLNQEALKNTYDVSAISFGLYPKIANDYALLPTATSFGNGYGPKLVKKKGVKLKKDFRVALSGEHTTNALLFKIYYKHARIAYMNFLDIEKAVLEGKAHAGVLIHESILDVHNELEVEKELWDVWKELIEVDLPLPLGGMAIRRSIPLYRAILIKKALIKAVETALKHQDLLSDMLLERSLIRVNKERLQTYLSLYANETSTRLSEVQILAIDKLFELGYQHGFYANLLKTKDCLLTDEYLKYRFS

SEQ ID NO: 8543 - protein, 314 aa, Helicobacter pylori
  misc_feature (B) LOCATION 1...314
  hypothetical: YES
SLKKSLFVCLHLLPLNHLIEFDLFILSNPSLKSIIIKGLTLSQKDFTLISVAHSPDADDIFMYYAIKFGWIDCPIKNKIFHNIALDIETLNQEALKNTYDVSAISFGLYPKIANDYALLPTATSFGNGYGPKLVKKKGVKLKKDFRVALSGEHTTNALLFKIYYKHARIAYMNFLDIEKAVLEGKAHAGVLIHESILDVHNELEVEKELWDVWKELIEVDLPLPLGGMAIRRSIPLYRAILIKKALIKAVETALKHQDLLSDMLLERSLIRVNKERLQTYLSLYANETSTRLSEVQILAIDKLFELGYAARILR

SEQ ID NO: 8544 - protein, 87 aa, Helicobacter pylori
  misc_feature (B) LOCATION 1...87
  hypothetical: YES
MPLETITLAHIYEEQGFFEEALQIYTNILKKTPDNTEALKQMKRLEKIQKNCAPFKHDALLKQHYLNFIKGDRLSVENLEKWLVEWN

SEQ ID NO: 8545 - protein, 90 aa, Helicobacter pylori
  misc_feature (B) LOCATION 1...90
  hypothetical: YES
EKRMPLETITLAHIYEEQGFFEEALQIYTNILKKTPDNTEALKQMKRLEKIQKNCAPFKHDALLKQHYLNFIKGDRLSVENLEKWLVEWN

SEQ ID NO: 8546 - protein, 138 aa, Helicobacter pylori
  misc_feature (B) LOCATION 1...138
  hypothetical: YES
REKIAKMVKKIQEPLQKHQEIFDNLHAHFPHVESFKTALNEQQEILNALKSIEEEAANCSDSSMQAMDIMQFQDIHRQKIERVVNVMRALSQYMNSLFEGKIDDSKRVSSATYITGDDDKDLASADDIEALIASFGAK

SEQ ID NO: 8547 - protein, 153 aa, Helicobacter pylori
  misc_feature (B) LOCATION 1...153
  hypothetical: YES
GTTMTQEELDALMSGGDLENLEALEAKEEAKEPTKEEPKESKENSNYSEKMTVKKEDAEKYGKISPHEWPPPPPTEEHKVVHQLDDVTRDSEVKATQIFDQLDLIGASAKKSLKWLKKSKNLCKNTKKFLTICMRISPMLNLLKPRSMSNKKS

SEQ ID NO: 8548 - protein, 243 aa, Helicobacter pylori
  misc_feature (B) LOCATION 1...243
  hypothetical: YES
MTQEELDALMSGGDLENLEALEAKEEAKEPTKEEPKESKENSNYSEKMTVKKEDAEKYGKISPHEWPPPPPTEEHKVVHQLDDVTRDSEVKATQIFDQLDLIGASAEKIAKMVKKIQEPLQKHQEIFDNLHAHFPHVESFKTALNEQQEILNALKSIEEEAANCSDSSMQAMDIMQFQDIHRQKIERVVNVMRALSQYMNSLFEGKIDDSKRVSSATYITGDDDKDLASADDIEALIASFGAK

SEQ ID NO: 8549 - protein, 110 aa, Helicobacter pylori
  misc_feature (B) LOCATION 1...110
  hypothetical: YES
VKTSCLVTIGRIRGVFIIKAQLLLREGGFMNFTAYNTKTPGHLHLYVHKGHTELGEGERLIKTLSMKLAQGLPKEWRVFPSNEWPKEFNILALPYEVFAKERGSSWAKHL

SEQ ID NO: 8550 - protein, 180 aa, Helicobacter pylori
  misc_feature (B) LOCATION 1...180
  hypothetical: YES
MTEMELKLIKIDTSHYFEKKPGLGERMDYAGRCYYNKFQRVNAMLTSSLIQKHLKREIEIAHNLILRNDKVENIVFDYNGRNPERFYHKAQLLLREEGFMNFTAYNTKTPGHLHLYVHKGHTELGEGERLIKTLSMKLAQGLPKEWRVFPSNEWPKEFNILALPYEVFAKERGSSWAKHL

SEQ ID NO: 8551 - protein, 183 aa, Helicobacter pylori
  misc_feature (B) LOCATION 1...183
  hypothetical: YES
GSMMTEMELKLIKIDTSHYFEKKPGLGERMDYAGRCYYNKFQRVNAMLTSSLIQKHLKREIEIAHNLILRNDKVENIVFDYNGRNPERFYHKAQLLLREEGFMNFTAYNTKTPGHLHLYVHKGHTELGEGERLIKTLSMKLAQGLPKEWRVFPSNEWPKEFNILALPYEVFAKERGSSWAKHL

SEQ ID NO: 8552 - protein, 448 aa, Helicobacter pylori
  misc_feature (B) LOCATION 1...448
  hypothetical: YES
MKVYLRKIDNQILHNKRISIKKGILEHFFDKANNQDEVDMSGILSNYNDKVSILLATDPRLGGGIKRIISAEVDKIKENRLDYELKIDDILLFTYISYKKYTLEIILLADTRYNVLNGLINNSKHLLVFSENETRTLDDGKINESVRIDGGKNIILYGVPGSGKSYTLQRDYCNNSVVEKIVFHPDYSYSDFVGQIMPSVDDSGIVSYKFNPGPFTNILKKAYHNPQTKHVLVIDEINRGNVPAIFGEIFQLLDRLKHDKDGFKKGSSEYAINNTDIANIVHNDKNASIRIPSNLWIVATMNTSDQNVFTLDTAFQRRFSMQLVENSFENVDDDFKNMKILDTDMTWQKFCTTINEKIAQNNEGLSSMEDKRFGVYFVSIDDLKSKENFAHKVIKYLWDDVFKFDRNIIFNTTKFNTLEAVVKNFIKEKDRTQFDVFSDDIKELLFNV

SEQ ID NO: 8553 - protein, 449 aa, Helicobacter pylori
  misc_feature (B) LOCATION 1...449
  hypothetical: YES
KMKVYLRKIDNQILHNKRISIKKGILEHFFDKANNQDEVDMSGILSNYNDKVSILLATDPRLGGGIKRIISAEVDKIKENRLDYELKIDDILPFTYISYKKYTLEIILLADTRYNVLNGLINNSKHLLVFSENETRTLDDGKINESVRIDGGKNIILYGVPGSGKSYTLQRDYCNNSVVEKIVFHPDYSYSDFVGQIMPSVDDSGIVSYKFNPGPFTNILKKAYHNPQTKHVLVIDEINRGNVPAIFGEIFQLLDRLKHDKDGFKKGSSEYAINNTDIANIVHNDKNASIRIPSNLWIVATMNTSDQNVFTLDTAFQRRFSMQLVENSFENVDDDFKNMKILDTDMTWQKFCTTINEKIAQNNEGLSSMEDKRFGVYFVSIDDLKSKENFAHKVIKYLWDDVFKFDRNIIFNTTKFNTLEAVVKNFIKEKDRTQFDVFSDDIKELLFNV

SEQ ID NO: 8554 - protein, 308 aa, Helicobacter pylori
  misc_feature (B) LOCATION 1...308
  hypothetical: YES
MAKENLPIVFGPVLSRRFGKSLGVDLSPSKKQCNYNCIYCELGKAKPIERMEEVIKVETLISTIQNALNNLTTPIDVLTITANGEPTLYPHLLELIQSIKPFLKGVKTLILSNGSLFYEPKVQQALKEFDIVKFSLDAIDLKAFERVDKPYSKDINKILEGILSFSQIYQGQLVAEVLLIKGVNDSANNLKLIADFLKKINTARVDLSTIDRPSSFKAPKLSEDELLKCSLFFEGLCVSLPKRSTAQAKKLVSCGIDELLALISRRPLSAEEAPLILDPNAFKHLETLLNHKQITIKKVGSLEFYCAF

SEQ ID NO: 8555 - protein, 311 aa, Helicobacter pylori
  misc_feature (B) LOCATION 1...311
  hypothetical: YES
RKIMAKENLPIVFGPVLSRRFGKSLGVDLSPSKKQCNYNCIYCELGKAKPIERMEEVIKVETLISTIQNALNNLTTPIDVLTITANGEPTLYPHLLELIQSIKPFLKGVKTLILSNGSLFYEPKVQQALKEFDIVKFSLDAIDLKAFERVDKPYSKDINKILEGILSFSQIYQGQLVAEVLLIKGVNDSANNLKLIADFLKKINTARVDLSTIDRPSSFKAPKLSEDELLKCSLFFEGLCVSLPKRSTAQAKKLVSCGIDELLALISRRPLSAEEAPLILDPNAFKHLETLLNHKQITIKKVGSLEFYCAF

SEQ ID NO: 8556 - protein, 209 aa, Helicobacter pylori
  misc_feature (B) LOCATION 1...209
  hypothetical: YES
LQHSRLQTLRSLYMERLLGETYTDISLIKPQNKPLNKQVHEGIENCNLCKRHQHSKPITGLFNPTSKLAFITLTPMLDSQLHFLNNLKAAMLESIIQKVFNYPLKDCSILSLLKCDSNSLNLEEEINACLPHLTWQLDNSAPKVIIVFGEVLPKRLLNLSKEESFGRIVSLKTKHFLSTHALEDMLKNPTLKKEALAHFKIALQFLNQS

SEQ ID NO: 8557 - protein, 213 aa, Helicobacter pylori
  misc_feature (B) LOCATION 1...213
  hypothetical: YES
RLNALQHSRLQTLRSLYMERLLGETYTDISLIKPQNKPLNKQVHEGIENCNLCKRHQHSKPITGLFNPTSKLAFITLTPMLDSQLHFLNNLKAAMLESIIQKVFNYPLKDCSILSLLKCDSNSLNLEEEINACLPHLTWQLDNSAPKVIIVFGEVLPKRLLNLSKEESFGRIVSLKTKHFLSTHALEDMLKNPTLKKEALAHFKIALQFLNQS

SEQ ID NO: 8558 - protein, 421 aa, Helicobacter pylori
  misc_feature (B) LOCATION 1...421
  hypothetical: YES
GETGDEPPLKIVVAEWWPMDKRESKGFRRFILYFILSQRYTITLHQNPNEPSDLVFGSPIGSARKILSYQNTKRVFYTGENEVPNFNLFDYAIGFDELDFRDRYLRMPLYYASLHYKAESVNDTTAPYKLKDNSLYALKKPSHHFKENHPNLCAVVNDESDPLKRGFASFVASNPNAPIRNAFYDALNSIEPVTGGGSVKNTLGYNVKNKSEFLSQYKFNLCFENTQGYGYVTEKIIDAYFSHTIPIYWGSPSVAKDFNPKSFVNVCDFKNFDEAIDYVRYLHTHPNAYLDMLYENPLNTLDGKAYFYQNLSFKKILDFFKTILENDTIYHDNPFIFYRDLNEPLVAIDDLRVNYDDLRVNYDDLRVNYDDLRVNYDRLLQNASPLLELSQNTTFKIYRKAYQKSLPLLRAIRRWVKKLGL

SEQ ID NO: 8559 - protein, 436 aa, Helicobacter pylori
  misc_feature (B) LOCATION 1...436
  hypothetical: YES
MFQPLLDAYTDSTRLDETDYKPPLNIALANWWPLDKRESKGFRRFILYFILSQRYTITLHQNPNEPSDLVFGSPIGSARKILSYQNTKRVFYTGENEVPNFNLFDYAIGFDELDFRDRYLRMPLYYASLHYKAESVNDTTAPYKLKDNSLYALKKPSHHFKENHPNLCAVVNDESDPLKRGFASFVASNPNAPIRNAFYDALNSIEPVTGGGSVKNTLGYNVKNKSEFLSQYKFNLCFENTQGYGYVTEKIIDAYFSHTIPIYWGSPSVAKDFNPKSFVNVCDFKNFDEAIDYVRYLHTHPNAYLDMLYENPLNTLDGKAYFYQNLSFKKILDFFKTILENDTIYHDNPFIFYRDLNEPLVAIDDLRVNYDDLRVNYDDLRVNYDDLRVNYDRLLQNASPLLELSQNTTFKIYRKAYQKSLPLLRAIRRWVKKLGL

SEQ ID NO: 8560 - protein, 290 aa, Helicobacter pylori
  misc_feature (B) LOCATION 1...290
  hypothetical: YES
LTPNKKLFKKIYIELSDICGLQCGFCPNPKNIRGVMPLELFEKVCKEAVPLTPMITLHVLGDPCKLKNLNRYLNAAKRFSLKVDLVTSGAYLHNFETLLQDAIYQISISLDAGLDNHNKLNQHRYIQKILEFCRYKCEKNSEVFLNLRIQDSTLDKHQNLIKPFLESFECVSLETLKSQGRARLFKKSFLNIQKTFKWPNLNAQNPLNQESKIPYCYGLIKQIAILSNGVVVPCCMDTQAHINLGDLNHTPLKDILNSQKAMAIKTHFLKGEALELLCQNCSYPLIRYKK

SEQ ID NO: 8561 - protein, 291 aa, Helicobacter pylori
  misc_feature (B) LOCATION 1...291
  hypothetical: YES
ELTPNKKLFKKIYIELSDICGLQCGFCPNPKNIRGVMPLELFEKVCKEAVPLTPMITLHVLGDPCKLKNLNRYLNAAKRFSLKVDLVTSGAYLHNFETLLQDAIYQISISLDAGLDNHNKLNQHRYIQKILEFCRYKCEKNSEVFLNLRIQDSTLDKHQNLIKPFLESFECVSLETLKSQGRARLFKKSFLNIQKTFKWPNLNAQNPLNQESKIPYCYGLIKQIAILSNGVVVPCCMDTQAHINLGDLNHTPLKDILNSQKAMAIKTHFLKGEALELLCQNCSYPLIRYKK

SEQ ID NO: 8562 - protein, 73 aa, Helicobacter pylori
  misc_feature (B) LOCATION 1...73
  hypothetical: YES
MCLTGGLMRWLKSVKPERILHSVVEFVDIAGLIKGASKGEGLGNQFLANIKECEVILQVVRCFEDDNNHACER

SEQ ID NO: 8563 - protein, 366 aa, Helicobacter pylori
  misc_feature (B) LOCATION 1...366
  hypothetical: YES
MGLSVGIVGLPNVGKSSTFNALTKTQNAQSANYPFCTIEPNKAIVNVPDRRLDALAQIVKPERILHSVVEFVDIAGLIKGASKGEGLGNQFLANIKECEVILQVVRCFEDDNITHVNDKIDPLNDIETIELELILADIATLDKRIDRLQKALKSSKDAKNLLECALSLKTHLEELKPAKTFPLNTSEAFLELDKELRFLSHKKMIYVANVGEEDLNILNEHAKKVENHAKVQNSEFVALCAKLEEEMVSMSGDEVKEFLQSLGVEESGLEKTIRLSFKELGLINYFTAGVKEVRSWTIKKGSSAPVAAGVIHKDFEKGFIRAETISYDDFIAYKGEAGAKEKGALRIEGKDYIVQDGDVLHFRFNV

SEQ ID NO: 8564 - protein, 370 aa, Helicobacter pylori
  misc_feature (B) LOCATION 1...370
  hypothetical: YES
KRLEMGLSVGIVGLPNVGKSSTFNALTKTQNAQSANYPFCTIEPNKAIVNVPDRRLDALAQIVKPERILHSVVEFVDIAGLIKGASKGEGLGNQFLANIKECEVILQVVRCFEDDNITHVNDKIDPLNDIETIELELILADIATLDKRIDRLQKALKSSKDAKNLLECALSLKTHLEELKPAKTFPLNTSEAFLELDKELRFLSHKKMIYVANVGEEDLNILNEHAKKVENHAKVQNSEFVALCAKLEEEMVSMSGDEVKEFLQSLGVEESGLEKTIRLSFKELGLINYFTAGVKEVRSWTIKKGSSAPVAAGVIHKDFEKGFIRAETISYDDFIAYKGEAGAKEKGALRIEGKDYIVQDGDVLHFRFNV

SEQ ID NO: 8565 - protein, 159 aa, Helicobacter pylori
  misc_feature (B) LOCATION 1...159
  hypothetical: YES
VNSFLVRLLAVNSYAFDWNIFKYNLGFNMFIMDHEGSTPYWVNTNTNLKTRLTPNFGIQFYTRGVEQSLTVGAYFFQNFHNYSTNFPYRWGPTMYYKARGKRFTFYGGIFPRKNLLGRYGLNIFAPYYWFIDPNARWVLLQFKTIIRLQNPIMGMRSLC

SEQ ID NO: 8566 - protein, 77 aa, Helicobacter pylori
  misc_feature (B) LOCATION 1...77
  hypothetical: YES
VLKYPTMFMCADAVIISKADMIEVFNFRVSQVKEDMQKLKPEAPIFLMSSKDPKSLEDFKNFLLEKKRENYQSTHSF

SEQ ID NO: 8567 - protein, 242 aa, Helicobacter pylori
  misc_feature (B) LOCATION 1...242
  hypothetical: YES
MSEQRKESLQNNPNLSKKDIKIVEKILSKNDIKAAEMKERYLKEGLYVLNFMSSPGSGKTTMLENLADFKDFKFCVVEGDLQTNRDADRLRKKGVSAHQITTGEACHLEASMIEGAFDLLKDEGALEKSDFLIIENVGNLVCPSSYNLGAAMNIVLLSVPEGDDKVLKYPTMFMCADAVIISKADMIEVFNFRVSQVKEDMQKLKPEAPIFLMSSKDPKSLEDFKNFLLEKKRENYQSTHSF

SEQ ID NO: 8568 - protein, 246 aa, Helicobacter pylori
  misc_feature (B) LOCATION 1...246
  hypothetical: YES
KGTSMSEQRKESLQNNPNLSKKDIKIVEKILSKNDIKAAEMKERYLKEGSVCVNFMSSPGSGKTTMLENLADFKDFKFCVVEGDLQTNRDADRLRKKGVSAHQITTGEACHLEASMIEGAFDLLKDEGALEKSDFLIIENVGNLVCPSSYNLGAAMNIVLLSVPEGDDKVLKYPTMFMCADAVIISKADMIEVFNFRVSQVKEDMQKLKPEAPIFLMSSKDPKSLEDFKNFLLEKKRENYQSTHSF

SEQ ID NO: 8569 - protein, 245 aa, Helicobacter pylori
  misc_feature (B) LOCATION 1...245
  hypothetical: YES
GTSMSEQRKESLQNNPNLSKKDIKIVEKILSKNDIKAAEMKERYLKEGSVCVNFMSSPGSGKTTMLENLADFKDFKFCVVEGDLQTNRDADRLRKKGVSAHQITTGEACHLEASMIEGAFDLLKDEGALEKSDFLIIENVGNLVCPSSYNLGAAMNIVLLSVPEGDDKVLKYPTMFMCADAVIISKADMIEVFNFRVSQVKEDMQKLKPEAPIFLMSSKDPKSLEDFKNFLLEKKRENYQSTHSF

SEQ ID NO: 8570 - protein, 99 aa, Helicobacter pylori
  misc_feature (B) LOCATION 1...99
  hypothetical: YES
MRMVHFLEGVHFEKLHIEALSENSSNKEIRICMPKGAIMDKHKAPGAISVQVLEGKIVFEVGDEKIEMPKGALISLEAQVSHRLDALENSVIRLSLSKK

SEQ ID NO: 8571 - protein, 119 aa, Helicobacter pylori
  misc_feature (B) LOCATION 1...119
  hypothetical: YES
RRVRNRFTSQRNGRKNKGRLMRMVHFLEGVHFEKLHIEALSENSSNKEIRICMPKGAIMDKHKAPGAISVQVLEGKIVFEVGDEKIEMPKGALISLEAQVSHRLDALENSVIRLSLSKK

SEQ ID NO: 8572 - protein, 128 aa, Helicobacter pylori
  misc_feature (B) LOCATION 1...128
  hypothetical: YES
RIVMPSPVNPIHTNANALNSGAKNEVKDAKNAPKSASKDFSKILNQKISKDKTAPKESPNHSALKATPKDAKEDAKALEKTPTLPHQHAQNLAKDQQAPTLKDWLNHPKTHPTAPHEAQHETHEANGN

SEQ ID NO: 8573 - protein, 426 aa, Helicobacter pylori
  misc_feature (B) LOCATION 1...426
  hypothetical: YES
KIGSTTQKPTQQPHMRPNMKPMRLMETNPITLNETLSKNVKKPNEVASNAHQTNLPNKNPITPNHANNVIKNPTTPTHNVKDPKTFKDIQTLSQKHDLNASNIQAATTPENKNPLNASDHLALKTTQASINHTLTKNDAKNTANLSSVLQSLEKKEPQNKEHANPPNNEKKTPPLKEALQMNAIKRDKTLSKKKPEKTPIHAKTQTIAPSATPENAPKIPLKTLPLMPLIGANPPPNDNAPTPLEKEEKTKEISDNKEKAKETNSSAQSVQNTQASDKTSDNKSTTPKETIRHFTQQLKQEIQEYKPPMSKISMDLFPKELGKVEVTIQKVGKNLKVSVISHNNSLQTFLDNQQDLKNSLNALGFEGVNLSFSQDSSKEQQAPKDQPKEPFKEQELTPLKENALKSYQENTDHENQETSMQITLYA

SEQ ID NO: 8574 - protein, 524 aa, Helicobacter pylori
  misc_feature (B) LOCATION 1...524
  hypothetical: YES
MPSPVNPIHTNANALNSGAKNEVKDAKNAPKSASKDFSKILNQKISKDKTAPKESPNHSALKATPKDAKEDAKALEKTPTLPHQHAQNLAKDQQAPTLKDWLNHPKTHPTAPHEAQHETHEANETNPKTPNETLSKNEKKPNEVASNAHQTNLPNKNPITPNHANNAIKNPTTPTHNVKDPKTLKDIQTLSQKHDLNASNIQAATTPENKNPLNASDHLALKTTQASINHTLTKNDAKNTANLSSVLQSLEKKEPQNKEHANPPNNEKKTPPLKEALQMNAIKRDKTLSKKKPEKTPIHAKTQTIAPSATPENAPKIPLKTLPLMPLIGANPPPNDNAPTPLEKEEKTKEISDNKEKAKETNSSAQSVQNTQASDKTSDNKSTTPKETIRHFTQQLKQEIQEYKPPMSKISMDLFPKELGKVEVTIQKVGKNLKVSVISHNNSLQTFLDNQQDLKNSLNALGFEGVDLSFSQDSSKEQQAPKDQPKEPFKEQELTPLKENALKSYQENTDHENQETSMQITLYA

SEQ ID NO: 8575 - protein, 193 aa, Helicobacter pylori
  misc_feature (B) LOCATION 1...193
  hypothetical: YES
MVPTQLNEIAEFLKTNPYNLSQPLQDGRLNSSVNEEEILNTIKDYFPIQLPRVREWWDFSFEENKIFYPVNIKTTTTKTADNLNGKLGIYYALCGLVPEFNNEIAWEKYFQKLHKDLGTNTNRDYYFLIINKNDPKDIFINSLKGIQTLQPNNLPFQCKWDNNRKIVQRSFIESKNFILSALAKSVKLRSNIY

SEQ ID NO: 8576 - protein, 196 aa, Helicobacter pylori
  misc_feature (B) LOCATION 1...196
  hypothetical: YES
GYLMVPTQLNEIAEFLKTNPYNLSQPLQDGRLNSSVNEEEILNTIKDYFPIQLPRVREWWDFSFEENKIFYPVNIKTTTTKTADNLNGKLGIYYALCGLVPEFNNEIAWEKYFQKLHKDLGTNTNRDYYFLIINKNDPKDIFINSLKGIQTLQPNNLPFQCKWDNNRKIVQRSFIESKNFILSALAKSVKLRSNIY

SEQ ID NO: 8577 - protein, 54 aa, Helicobacter pylori
  misc_feature (B) LOCATION 1...54
  hypothetical: YES
MCLAIPSKVIAINDNVALLETLGVQREASLDLMGESVKVGDYVLLHIGYVMSKD

SEQ ID NO: 8578 - protein, 78 aa, Helicobacter pylori
  misc_feature (B) LOCATION 1...78
  hypothetical: YES
MCLAIPSKVIAINDNVALLETLGVQREASLDLMGESVKVGDYVLLHIGYVMSKIDEKEALESIELYQEMIAKMNETHE

SEQ ID NO: 8579 - protein, 87 aa, Helicobacter pylori
  misc_feature (B) LOCATION 1...87
  hypothetical: YES
KLPIHAFVLMCLAIPSKVIAINDNVALLETLGVQREASLDLMGESVKVGDYVLLHIGYVMSKIDEKEALESIELYQEMIAEVNETHE

SEQ ID NO: 8580 - protein, 126 aa, Helicobacter pylori
  misc_feature (B) LOCATION 1...126
  hypothetical: YES
VHAGEYKEIGTFTRAWKPNEKEFLQNLVNEQYQMFVDDVAKARKLNAKDYKDFAEGKVFSAQKALKLKLIDKISTIKQAQDRLMELSKVKKAYWLEKSPMERFIEKATQSVTSIITQAFGYQLLMR

SEQ ID NO: 8581 - protein, 133 aa, Helicobacter pylori
  misc_feature (B) LOCATION 1...133
  hypothetical: YES
SAVATQGVHAGEYKEIGTFTRAWKPNEKEFLQNLVNEQYQMFVDDVAKARKLNAKDYKDFAEGKVFSAQKALKLKLIDKISTIKQAQDRLMELSKVKKAYWLEKSPMERFIEKATQSVTSIITQAFGYQLLMR

SEQ ID NO: 8582 - protein, 512 aa, Helicobacter pylori
  misc_feature (B) LOCATION 1...512
  hypothetical: YES
GYQHPNATLPVLPILWGEAKRGDFDDLDKAFTQLLLTIGKHKLYTHHTPPYLCAFNAFRMEFIAFNDTITSFFYKSDIDFSIPPSNHNTEGFKHALDAFKAMCKPHNKRVFDFKTQSQECKEFIKDHLNSSHLHNKIQIDKNNFFTIYQKWLEIVKPTIKIDWELAKAEGILDADYYLADLLSDGDKTIIEKLRTILKSSHYELKWGSNTLNKLGLEGITKVGFTDNQQAHQEFWSVYERPPKSEFQASILERRDLLVPSDVRERKGAYFTPKIWVEKSQEYLAKALGQDYQEDYIIWDCAGGTGNLLRGLLNKANLYLSTLDHNDVAIIKDLASKNHLKMLENQVFQFDFLNDDFFSDKTPKSLQEILKDEEKRKKLIIYINPPYAEATSAKTPSGTGKNKDLVARGNLICKKYKDELHKANNELFAQFFMRIYKELNGCIMASFSTLKYLNSSHFKKFREVFKAKFLEGFMVPADSFDNVTGQFPIGFLVWDTATPPPLKTNQRVQFRSV

SEQ ID NO: 8583 - protein, 538 aa, Helicobacter pylori
  misc_feature (B) LOCATION 1...538
  hypothetical: YES
MLLDFSNLNEEPLKIQIKAEFFKDEKFLYSGDKIDFMLSYQHPNATLPVLPILWGEAKRGDFDDLDKAFTQLLLTIGKHKLYTHHTPPYLCAFNAFRMEFIAFNDTITSFFYKSDIDFSIPPSNHNTEGFKHALDAFKAMCKPHNKRVFDFKTQSQECKEFIKDHLNSSHLHNKIQIDKNNFFTIYQKWLEIVKPTIKIDWELAKAEGILDADYYLADLLSDGDKTIIEKLRTILKSSHYELKWGSNTLNKLGLEGITKVGFTDNQQAHQEFWSVYERPPKSEFQASILERRDLLVPSDVRERKGAYFTPKIWVEKSQEYLAKALGQDYQEDYIIWDCAGGTGNLLRGLLNKANLYLSTLDHNDVAIIKDLASKNHLKMLENQVFQFDFLNDDFFSDKTPKSLQEILKDEEKRKKLIIYINPPYAEATSAKTPSGTGKNKDLVARGNLICKKYKDELHKANNELFAQFFMRIYKELNGCIMASFSTLKYLNSSHFKKFREVFKAKFLEGFMVPADSFDNVTGQFPIGFLVWDTATPPP

SEQ ID NO: 8584 - protein, 550 aa, Helicobacter pylori
  misc_feature (B) LOCATION 1...550
  hypothetical: YES
MLLDFSNLNEEPLKIQIKAEFFKDEKFLYSGDKIDFMLSYQHPNATLPVLPILWGEAKRGDFDDLDKAFTQLLLTIGKHKLYTHHTPPYLCAFNAFRMEFIAFNDTITSFFYKSDIDFSIPPSNHNTEGFKHALDAFKAMCKPHNKRVFDFKTQSQECKEFIKDHLNSSHLHNKIQIDKNNFFTIYQKWLEIVKPTIKIDWELAKAEGILDADYYLADLLSDGDKTIIEKLRTILKSSHYELKWGSNTLNKLGLEGITKVGFTDNQQAHQEFWSVYERPPKSEFQASILERRDLLVPSDVRERKGAYFTPKIWVEKSQEYLAKALGQDYQEDYIIWDCAGGTGNLLRGLLNKANLYLSTLDHNDVAIIKDLASKNHLKMLENQVFQFDFLNDDFFSDKTPKSLQEILKDEEKRKKLIIYINPPYAEATSAKTPSGTGKNKDLVARGNLICKKYKDELHKANNELFAQFFMRIYKELNGCIMASFSTLKYLNSSHFKKFREVFKAKFLEGFMVPADSFDNVTGQFPIGFLVWDTATPPPLKTNQRVQFRSV

SEQ ID NO: 8585 - protein, 70 aa, Helicobacter pylori
  misc_feature (B) LOCATION 1...70
  hypothetical: YES
FSSLGLVGFKDEKHLIKEIQGGLEVLLKSSNAEILNNPKKLEDHTRNFIRKALFKKFRKYPAIICHAHSF

SEQ ID NO: 8586 - protein, 103 aa, Helicobacter pylori
  misc_feature (B) LOCATION 1...103
  hypothetical: YES
EYNHVARHKQTAIACGVPEKNIYLMEDGDQVEVGPAFIKKVGTIKSGKSYVDNQSNLSIDTSIVQQREEVASAGVFAATIFVNKNKQALLESSLIFQFRACGF

SEQ ID NO: 8587 - protein, 372 aa, Helicobacter pylori
  misc_feature (B) LOCATION 1...372
  hypothetical: YES
MAKRGLMLLLSDSTNSHKSGTTPSESTIAPAFDTLFKEAQGRVIMSTFSSNIHRVHQAIQYGIKYNRKIAVIGRSMEKNLDIARELGYIHLPYQSFIEANEVAKYPDNEVLIVTTGSQGETMSALYRMATDEHRHISIKPNDLVIISAKAIPGNEASVSAVLNFLIKKEAKVAYQEFDNIHVSGHAAQEEQKLMLRLIKPKFFLPVHGEYNHVARHKQTAIACGVPEKNIYLMEDGDQVEVGPAFIKKVGTIKSGKSYVDNQSNLSIDTSIVQQREEVASAGVFAATIFVNKNKQALLESSQFSSLGLVGFKDEKHLIKEIQGGLEVLLKSSNAEILNNPKKLEDHTRNFIRKALFKKFRKYPAIICHAHSF

SEQ ID NO: 8588 - protein, 468 aa, Helicobacter pylori
  misc_feature (B) LOCATION 1...468
  hypothetical: YES
SQKNAAIVKGNDLYRFFSKLKQWAGADEKQNFRDLEEDFSLESFTHCTDFNPIEIYAYCISRSINNMENGVFLKYFLSYPIKYEKHQAEKIRESFERGLKKSLPRHVFDDEKTAKTFKVELRASEPCAYAISALKSYGFFKSEKLDKPVYYGVFDFGGGTTDFDFGKWEKRASPKFAYKMTHFSSGGDKYLGGENLLELLAWETYAKNFQTLKEKDIVIAKPNYDRIDTQLFGSFMQNSSGVRLNLQTIASQLRPFLENLDANIIEAIEENENFEIKGFEKDFKAMLFDRNGVETECDLKVDCKELLNLLKGKIEDGVANFFAGFSKVMAENIDDQCRAFHIFLGRNVSRSALVKQAFENAKEKQLKDYHQKTSKNDFKFIIYEPLGTEKSDKQILELTGEDVSNTPAYLKPTCKTGVAFGLLESRDKAQGIEMPSISSNPVFKYDLGIEIEGKFHAKIHRDSLKPNE

SEQ ID NO: 8589 - protein, 522 aa, Helicobacter pylori
  misc_feature (B) LOCATION 1...522
  hypothetical: YES
LLSIGGLVDDASLTKFENPTIVEFRHIKKFITEYNALDHRPFTEKNDIEVAHEAQKNAAIVKGNDLYRFFSKLKQWAGADEKQNFRDLEEDFSLESFTHCTDFNPIEIYAYCISRSINNMENGVFLKYFLSYPIKYEKHQAEKIRESFERGLKKSLPRHVFDDEKTAKTFKVELRASEPCAYAISALKSYGFFKSEKLDKPVYYGVFDFGGGTTDFDFGKWEKRASPKFAYKMTHFSSGGDKYLGGENLLELLAWETYAKNFQTLKEKDIVIAKPNYDRIDTQLFGSFMQNSSGVRLNLQTIASQLRPFLENLDANIIEAIEENENFEIKGFEKDFKAMLFDRNGVETECDLKVDCKELLNLLKGKIEDGVANFFAGFSKVMAENIDDQCRAFHIFLGRNVSRSALVKQAFENAKEKQLKDYHQKTSKNDFKFIIYEPLGTEKSDKQILELTGEDVSNTPAYLKPTCKTGVAFGLLESRDKAQGIEMPSISSNPVFKYDLGIEIEGKFHAKIHRDSLKPNEY

SEQ ID NO: 8590 - protein, 143 aa, Helicobacter pylori
  misc_feature (B) LOCATION 1...143
  hypothetical: YES
MVKEKSLELPLGHPLVEKLCELSLNNKAAFNEKSEPNFKDEVSEEDKIKFKQALRVFHAIVNNETSLRYLSDENQKFLEDLAQAKKITNEQIEKTLEIVSDSDVDVDFEKLKKLMLNVDSVAVGLKSYSQNQLLDLDGGHWDL

SEQ ID NO: 8591 - protein, 160 aa, Helicobacter pylori
  misc_feature (B) LOCATION 1...160
  hypothetical: YES
TSSSPNCNHKNHNKGNIMVKEKSLELPLGHPLVEKLCELSLNNKAAFNEKSEPNFKDEVSEEDKIKFKQALRVFHAIVNNETSLRYLSDENQKFLEDLAQAKKITNEQIEKTLEIVSDSDVDVDFEKLKKLMLNVDSVAVGLKSYSQNQLLDLDGGHWDL

SEQ ID NO: 8592 - protein, 79 aa, Helicobacter pylori
  misc_feature (B) LOCATION 1...79
  hypothetical: YES
RKYVTKYGNRHAALYYGESQFEFKTPFEKPTLALLEKLGVQNRVLSSKLDSKERLTVSMPHSEPNFKVSLASDFKVVVK

SEQ ID NO: 8593 - protein, 89 aa, Helicobacter pylori
  misc_feature (B) LOCATION 1...89
  hypothetical: YES
PLGSLLGYSLSNTGCEMIIERLVGNLRDLNPLDFNVDHVDLEWFETKKKIARFKTRQGKYISIRLKDAPKLGLSQGDILFREKKRNYRR

SEQ ID NO: 8594 - protein, 170 aa, Helicobacter pylori
  misc_feature (B) LOCATION 1...170
  hypothetical: YES
MIIERLVGNLRDLNPLDFNVDHVDLEWFETRKKIARFKTRQGKDIAIRLKDAPKLGLSQGDILFKEEKEIIAVNILDSEVIHIQAKSVAEVAKICYEIGNRHAALYYGESQFEFKTPFEKPTLALLEKLGVQNRVLSSKLDSKERLTVSMPHSEPNFKVSLASDFKVVVK

SEQ ID NO: 8595 - protein, 116 aa, Helicobacter pylori
  misc_feature (B) LOCATION 1...116
  hypothetical: YES
LKVTNPHLLVVIQDLNARIALMKLLFQNVKSANKELVFCNKEKRLIRSFDAQKEYGITPVENILSVLDTAMNPNSALVIDNLNEAKELHDKVGAEKLKSFLEKAXRQRAVLRHFCA

SEQ ID NO: 8596 - protein, 223 aa, Helicobacter pylori
  misc_feature (B) LOCATION 1...223
  hypothetical: YES
EKSTSNLKKPSVWRSKLICKIATHKARSIGLCVKPKSMKEKLRGAMVNILRIKMIEISEWLQKLDDALDKVVAKKEPESFLKPIISPIEDYQKSVRQIQAQFTDAPKFNEEGAYPQFLSCGLLQVRGKNGANMEFLLPKVYPFPPKSLYIEHEKDGQFLREMLMRLLSSAPLVQLEVILIDALSLGGIFNLARRLLDKNNDFIYQQRILTESKEIEEALKHLP

SEQ ID NO: 8597 - protein, 296 aa, Helicobacter pylori
  misc_feature (B) LOCATION 1...296
  hypothetical: YES
VKPKSMKEKLRGAMVNILRIKMIEISEWLQKLDDALDKVVAKKEPESFLKPIISPIEDYQKSVRQIQAQFTDAPKFNEEGAYPQFLSCGLLQVRGKNGANMEFLLPKVYPFPPKSLYIEHEKDGQFLREMLMRLLSSAPLVQLEVILIDALSLGGIFNLARRLLDKNNDFIYQQRILTESKEIEEALKHLHEYLKVNLQEKLAGFRDFVHYNENAKDSLPLKALFLSGVDALSKDALYYLEKIMRFGSKNGVLSFVNLESEKNNQSAEDLKRYAEFFKDRTSFEXLKYLNVEIISD

SEQ ID NO: 8598 - protein, 640 aa, Helicobacter pylori
  misc_feature (B) LOCATION 1...640
  hypothetical: YES
SICHEYLKVNLQEKLAGFRDFVHYNENAKDSLPLKALFLSGVDALSKDALYYLEKIMRFGSKNGVLSFVNLESEKNNQSAEDLKRYAEFFKDRTSFEGLKYLNVEIISDQGIKSQHMQDFADKIKAYYKQKKEVKRELKDLQRDKEFWTKSSQHEVSVPVGWDINHKEVCFKIGNEQNHTLICDHSGSGKSNFLHVLIQNLAFYYDPDEVQLFLLDYKEGVEFNAYVADPALEHARLVSVASSISYGITFLKWLCDEMQKRADRFKQFNVKDLSDYRKHEKMPRLIVVIDEFQVLFSDNKSTKAVEGHLNTLLKKGRSYGVHLVLATQTMRGTDINPSFKAQIANRIALPMDAEDSSSVLGDDAACEIQNPEGIFNNNGGNRKYHTKMSVPKAPDDFKSFLTKIHAEFNQRNLAPIDRKIYNGETPLKMPDTLKANEMRLHLGKKVDYEQKDLIVEFESNESHLLVVIQDLNARIALMKLLFQNVKSANKELVFCNKEKRLIRSFDAQKEYGITPVENILSVLDTAMNPNSALVIDNLNEAKELHDKVGAEKLKSFLEKAIDNEQYCVIFAHDFRQIKTNYHFDKLKELLNNHFKQCLAFRCNGENLNAIKSDLPPPSKLNVLLIELSKDSVTEFRPFSL

SEQ ID NO: 8599 - protein, 806 aa, Helicobacter pylori
  misc_feature (B) LOCATION 1...806
  hypothetical: YES
MIEISEWLQKLDDALDKVVAKKEPESFLKPIISPIEDYQKSVRQIQAQFTDAPKFNEEGAYPQFLSCGLLQVRGKNGANMEFLLPKVYPFPPKSLYIEHEKDGQFLREMLMRLLSSAPLVQLEVILIDALSLGGIFNLARRLLDKNNDFIYQQRILTESKEIEEALKHLHEYLKVNLQEKLAGFRDFVHYNENAKDSLPLKALFLSGVDALSKDALYYLEKIMRFGSKNGVLSFVNLESEKNNQSAEDLKRYAEFFKDRTSFECLKYLNVEIISDQGIKSQHMQDFADKIKAYYKQKKEVKRELKDLQRDKEFWTKSSQHEVSVPVGWDINHKEVCFKIGNEQNHTLICDHSGSGKSNFLHVLIQNLAFYYDPDEVQLFLLDYKEGVEFNAYVADPALKHARLVSVASSISYGITFLKWLCDEMQKRADRFKQFNVKDLSDYRKHEKMPRLIVVIDEFQVLFSDNKSTKAVEGHLNTLLKKGRSYGVHLVLATQTMRGTDINPSFKAQIANRIALPMDAEDSSSVLGDDAACEIQKPEGIFNNNGGNRKYHTKMSVPKAPDDFKSFLTKIHAEFNQRNLAPIDRKIYNGETPLKMPDTLKANEMRLHLGKKVDYEQKDLIVEFESNESHLLVVIQDLNARIALMKLLFQNVKSANKELVFCNKEKRLIRSFDAQKEYGITPVENILSVLDTAMNPNSALVIDNLNEAKELHDKVGAEKLKSFLEKAIDNEQYCVIFAHDFRQIKTNYHFDKLKELLNNHFKQCLAFRCNGENLNAIKSDLPPPSKLNVLLIELSKDSVTEFRPFSL

SEQ ID NO: 8600 - protein, 43 aa, Helicobacter pylori
  misc_feature (B) LOCATION 1...43
  hypothetical: YES
MISIALEEVEEVEVKVCCVDSQSIKVGLFKDGQLIYESEVEKL

SEQ ID NO: 8601 - protein, 44 aa, Helicobacter pylori
  misc_feature (B) LOCATION 1...44
  hypothetical: YES
LLCWGVRFLFRESFLKLKKRLKQNLLFFRFYFLLWLVFKNHFDF

SEQ ID NO: 8602 - protein, 86 aa, Helicobacter pylori
  misc_feature (B) LOCATION 1...86
  hypothetical: YES
MSRVQMDTEEVREFVGHLERFKELLNEEVNSLNGHFHNLESWQDARRDKFSEVLDNLKGTFNEFNEAAQEQIAWLKERIRVLEEDY

SEQ ID NO: 8603 - protein, 91 aa, Helicobacter pylori
  misc_feature (B) LOCATION 1...91
  hypothetical: YES
KKGQPMSRVQMDTEEVREFVGHLERFKELLNEEVNSLNGHFHNLESWQDARRDKFSEVLDNLKGTFNEFNEAAQEQIAWLKERIRVLEEDY

SEQ ID NO: 8604 - protein, 120 aa, Helicobacter pylori
  misc_feature (B) LOCATION 1...120
  hypothetical: YES
LEVKDRLNFNFVATTHSAMDLIASVLSDSKYYLESFYNQASQELGDKRSDKGEKLAELFDLLFEYIKDSKFERLKEPSAYDYSCKKLYPEQNTSQKMRRVVLRGYKHNDKMYHTIVDMGS

SEQ ID NO: 8605 - protein, 163 aa, Helicobacter pylori
  misc_feature (B) LOCATION 1...163
  hypothetical: YES
RKNNLNDQLNASQTQAEQTSRKLNELERRHAPYQKLEKLYEVFLEVKDRLNFNFVATTHSAMDLIASVLSDSKYYLESFYNQASQELGDKRSDKGEKLAELFDLLFEYIKDSKFERLKEPSAYDYSCKKLYPEQNTSQKMRRVVLRGYKHNDKMYHTIVDMGS

SEQ ID NO: 8606 - protein, 95 aa, Helicobacter pylori
  misc_feature (B) LOCATION 1...95
  hypothetical: YES
SNYGFSQLRYFMVGNESYMFKHVLNFNLESLLIDFMQSLKEWLEPEEIVFANDGYGGYYLWNTTTDVVLFLDTDNGSKKVLLNLNMFLKKLESRG

SEQ ID NO: 8607 - protein, 139 aa, Helicobacter pylori
  misc_feature (B) LOCATION 1...139
  hypothetical: YES
MDRISTETELNWEFVESLNENALSDSEERLEIGFSDAFKDFIKRSNYGSSQLRYFMVGNEFYMFKHVLNFNLESLLIDFMQSLKEWLEPEEIVFANDGYGGYYLWNTTTDVVLFLDTDNGSKKVLLNLNMFLKKLESRG

SEQ ID NO: 8608 - protein, 84 aa, Helicobacter pylori
  misc_feature (B) LOCATION 1...84
  hypothetical: YES
SGVTTMIGGGTGPADGTNATTITPGRRNLKWMLRAAEEYSMNLGFLAKGNASNDASLADQLKPVRLALKSTKTGATLLLQSIMR

SEQ ID NO: 8609 - protein, 113 aa, Helicobacter pylori
  misc_feature (B) LOCATION 1...113
  hypothetical: YES
KHLCANSLNSGGGKTLREGMSQSNNPSKEELDLIITNALIVDYTGIYKADIGIKDGKIAGIGKGGNKDMQDGVKNNLSVGPATEALAGEGLIERLVVLTHTVHFISPQQIPTV

SEQ ID NO: 8610 - protein, 274 aa, Helicobacter pylori
  misc_feature (B) LOCATION 1...274
  hypothetical: YES
AAIAGRTMHTFHTEGAGGGHAPDIIKVAGEHNILPASTNPTIPFTVNTEAEHMDMLMGCHHLDKSIKEDVQFADSRIRPQTIAAEDTLHDMGIFSITSSDSQAMGRVGEVITRTWQTADKNKKEFGRLKEEKGDNDNFRIKRYLFKYTINPAIAHGISEYVGSVEVGKVADLVLWSPAFFGVKPNMIIKGGFIALSQMGDANASIPTPQPVYYREMFAHHGKAKYDANITFVSQAAYDKGIKEELGLERQVLPVKNCRNITKKDMQFNDTTRSH

SEQ ID NO: 8611 - protein, 569 aa, Helicobacter pylori
  misc_feature (B) LOCATION 1...569
  hypothetical: YES
MKKISRKEYVSMYGPTTGDKVRLGDTDLIAEVEHDYTIYGEELKFGGGKTLREGMSQSNNPSKEELDLIITNALIVDYTGIYKADIGIKDGKIAGIGKGGNKDMQDGVKNNLSVGPATEALAGEGLIVTAGGIDTHIHFISPQQIPTAFASGVTTMIGGGTGPADGTNATTITPGRRNLKWMLRAAEEYSMNLGFLAKGNASNDASLADQIEAGAIGFKIHEDWGTTPSAINHALDVADKYDVQVAIHTDTLNEAGCVEDTMAAIAGRTMHTFHTEGAGGGHAPDIIKVAGEHNILPASTNPTIPFTVNTEAEHMDMLMVCHHLDKSIKEDVQFADSRIRPQTIAAEDTLHDMGIFSITSSDSQAMGRVGEVITRTWQTADKNKKEFGRLKEEKGDNDNFRIKRYLSKYTINPAIAHGISEYVGSVEVGKVADLVLWSPAFFGVKPNMIIKGGFIALSQMGDANASIPTPQPVYYREMFAHHGKAKYDANITFVSQAAYDKGIKEELGLERQVLPVKNCRNITKKDMQFNDTTAHIEVNPETYHVFVDGKEVTSKPANKVSLAQLFSIF

SEQ ID NO: 8612 - protein, 50 aa, Helicobacter pylori
  misc_feature (B) LOCATION 1...50
  hypothetical: YES
PPYVGADLKVMERDSKKMRGEKPFIFTNIRAKDSLDDVIAWIKRNALLED

SEQ ID NO: 8613 - protein, 171 aa, Helicobacter pylori
  misc_feature (B) LOCATION 1...171
  hypothetical: YES
SQIERNFMVKIGVCGPVGSGKTALIEALTRHMSKDYDMAVITNDIYTKEDAEFMCKNSVMPRDRIIGVETGGCPHTAIREDASMNLEAVEEMHGRFPNLELLLIESGGDNLSATFNPELADFTIFVIDVAEGDKIPRKGGPGITRSDLLVINKIDLTPLCGSGLESHGKGF

SEQ ID NO: 8614 - protein, 199 aa, Helicobacter pylori
  misc_feature (B) LOCATION 1...199
  hypothetical: YES
MVKIGVCGPVGSGKTALIEALTRHMSKDYDMAVITNDIYTKEDAEFMCKNSVMPRDRIIGVETGGCPHTAIREDASMNLEAVEEMHGRFPNLELLLIESGGDNLSATFNPELADFTIFVIDVAEGDKIPRKGGPGITRSDLLVINKIDLAPYVGADLKVMERDSKKMRGEKPFIFTNIRAKEGLDDVIAWIKRNALLED

SEQ ID NO: 8615 - protein, 286 aa, Helicobacter pylori
  misc_feature (B) LOCATION 1...286
  hypothetical: YES
MGTLIEKWFGFSQIREELEARISELEDENTELLREREYLAAETSELKDANDQLRQKNDKLFITKDKLTKENTELFAENESLSVKISGLEHSNDQLWQNNNKLTKEKAELKTEKDILAKENTRLLAARDRLTEEKRELTTEKERLKRENTELTHKITELTKENKALTTENDKLNHQVTALTNERDSLEQERARLQDAHGFLEKRCTNLEKENQRLTDKLKQLESAQKSLENTNNQLRQALENSNVQLAQAKEXIAIEXSELXRRNRTLEELRGYGSQKXIWTYTXGV

SEQ ID NO: 8616 - protein, 327 aa, Helicobacter pylori
  misc_feature (B) LOCATION 1...327
  hypothetical: YES
MGTLIEKWFGFSQIREELEARISELEDENTELLREREYLAAETSELKDANDQLRQKNDKLFITKDKLTKENTELFAENESLSVKISGLEHSNDQLWQNNNKLTKEKAELKTEKDILAKENTRLLAARDRLTEEKRELTTEKERLKRENTELTHKITELTKENKALTTENDKLNHQVTALTNERDSLEQERARLQDAHGFLEKRCTNLEKENQRLTDKLKQLESAQKSLENTNNQLRQALENSNVQLAQAKEKIAIEKSELEREIARLKSLEGMEAKSDLDLHNRRLASANEDLKRQNRKLEEENIALKERVDGLNEQLSKLQPQKPQ

SEQ ID NO: 8617 - protein, 327 aa, Helicobacter pylori; identical to SEQ ID NO: 8616
  misc_feature (B) LOCATION 1...327
  hypothetical: YES

SEQ ID NO: 8618 - protein, 194 aa, Helicobacter pylori
  misc_feature (B) LOCATION 1...194
  hypothetical: YES
GSLRNPLKKSITLKDGFASRDMHIVVGENAFLDFAPFPLIPFENAHFKGNTTISLRSSSQLLYSEIIVAGRVARNELFKFNRLHTKISILQDEKPIYYDNTILDPKTTNMNNMCMFDGYTHYLNLVLVNCPIELSGARELIEESEGVDGAVSKIASSHLCLKGFSERLRTLVAFKRKNRSLGYANHHAKGLKTL

SEQ ID NO: 8619 - protein, 265 aa, Helicobacter pylori
  misc_feature (B) LOCATION 1...265
  hypothetical: YES
MNTYAQESKLRLKTKIGADGRCVIEDNFFTPPFKLMAPFYPKDDLAEIMLLAVSPGLMKGDAQDMQLNIGPNCKLRITSQSFEKIHNTEDGFASRDMHIVVGENAFLDFAPFPLIPFENAHFKGNTTISLRSSSQLLYSEIIVAGRVARNELFKFNRLHTKISILQDEKPIYYDNTILDPKTTNMNNMCMFDGYTHYLNLVLVNCPIELSGARELIEESEGVDGAVSKIASSHLCLKALAKGSEPLLHLREKIARLVTQTTTQKV

SEQ ID NO: 8620 - protein, 88 aa, Helicobacter pylori
  misc_feature (B) LOCATION 1...88
  hypothetical: YES
RPNLSSQFLYTEMLSLKLTYESTLQQDLKKILGIEEVIMLSTSPMELRLANQKLGNRFIKTLQAMNELDMGAFFNAYAQTTQRSHPCH

SEQ ID NO: 8621 - protein, 113 aa, Helicobacter pylori
  misc_feature (B) LOCATION 1...113
  hypothetical: YES
TWVHFLTLTLKQPKDPTHATSYGVFAASLNMELKKALRHYLYAQTSNMVINCVKSVPLSQNDGQKILLSLQSPFNQLIEKTLELDESHLCAASVQNDIKAMQHESLYSRLYMS

SEQ ID NO: 8622 - protein, 162 aa, Helicobacter pylori
  misc_feature (B) LOCATION 1...162
  hypothetical: YES
MKAPSQXDLKKILGIEEVIXXSTSPMELRLANQKLGNRFIKTLQAMNELDMGAFFNAYAQTTKDPTHATSYGVFAASLNMELKKALRHYLYAQTSNMVINCVKSVPLSQNDGQKILLSLQSPFNQLIEKTLELDESHLCAASVQNDIKAMQHESLYSRLYMS

SEQ ID NO: 8623 - protein, 256 aa, Helicobacter pylori
  misc_feature (B) LOCATION 1...256
  hypothetical: YES
MDKGKSVKSTKKSVGMPPKTPKTDNNANSHVDNEFLILQVNDAVFPIGSYTHSFGLETYIQQKKVTNKESALEYLKANLSSQFLYTEMLSLKLTYESTLQQDLKKILGIEEVIMLSTSPMELRLANQKLGNRFIKTLQAMNELDMGAFFNAYAQTTKDPTHATSYGVFAASLNMELKKALRHYLYAQTSNMVINCVKSVPLSQNDGQKILLSLQSPFNQLIEKTLELDESHLCAASVQNDIKAMQHESLYSRLYMS

SEQ ID NO: 8624 - protein, 77 aa, Helicobacter pylori
  misc_feature (B) LOCATION 1...77
  hypothetical: YES
VNELKNSKQVLGNGKADLSNENTKVRQTKTNLTEKNQRLTTEKTELNNKITGLATEKERLAADKENLTKESRQRKPN

SEQ ID NO: 8625 - protein, 220 aa, Helicobacter pylori
  misc_feature (B) LOCATION 1...220
  hypothetical: YES
LFGKSSNDTQENPKDALKSTNFHEKHTKPTETTELVEENKALTTEKERLERENKNLTADKENLTKEKTELQKQVNELKNSKQVLENEKADWLREKENLTKDRENLTKEKTELTEKNKVLTTEKERLATEKENLTKEKTESQKQVNELKNSKQVLENEKADLTNENTKLKTDKTDLTEKNQRLTTEKTELNNKITGLATEKERLAADKENLTKESRQRKPN

SEQ ID NO: 8626 - protein, 275 aa, Helicobacter pylori
  misc_feature (B) LOCATION 1...275
  hypothetical: YES
KNQILQIPLLPPPPNNEELLKSITDLKDRLKKLEDLKLEDFEPLRKLSHFIVIGNLFGKSSNDTQENPKDALKSTNFHEKHTKPTETTELVEENKALTTEKERLERENKNLTADKENLTKEKTELQKQVNELKNSKQVLENEKADWLREKENLTKDRENLTKEKTELTEKNKVLTTEKERLATEKENLTKEKTESQKQVNELKNSKQVLENEKADLTNENTKLKTDKTDLTEKNQRLTTEKTELNNKITGLATEKERLAADKENLTKESRQRKPN

SEQ ID NO: 8627 - protein, 171 aa, Helicobacter pylori
  misc_feature (B) LOCATION 1...171
  hypothetical: YES
CPYYGRARAGKKTAAELMQEGRTLLKPDDVMDGVASMIHEVGIEAMFPDGTKLVTVHTPIEANGKLVPGELFLKNEDITINEGKKAVSVKVKNVGDRPVQIGSHFHFFEVNRCLDFDREKTFGKRLDIASGTAVRFEPGEEKSVELIDIGGNRRIFGFNALVDRQADTKAK

SEQ ID NO: 8628 - protein, 228 aa, Helicobacter pylori
  misc_feature (B) LOCATION 1...228
  hypothetical: YES
LMLHYAGELARKRKEKGIKLNYVEAVALISAHIMEEARAGKKTAAELMQEGRTLLKPDDVMDGVASMIHEVGIEAMFPDGTKLVTVHTPIEANGKLVPGELFLKNEDITINEGKKAVSVKVKNVGDRPVQIGSHFHFFEVNRCLDFDREKTFGKRLDIASGTAVRFEPGEEKSVELIDIGGNRRIFGFNALVDRQADNESKKIALHRAKERGFHGAKSDDNYVKTIKE

SEQ ID NO: 8629 - protein, 238 aa, Helicobacter pylori
  misc_feature (B) LOCATION 1...238
  hypothetical: YES
MKLTPKELDKLMLHYAGELARKRKEKGIKLNYVEAVALISAHIMEEARAGKKTAAELMQEGRTLLKPDDVMDGVASMIHEVGIEAMFPDGTKLVTVHTPIEANGKLVPGELFLKNEDITINEGKKAVSVKVKNVGDRPVQIGSHFHFFEVNRCLDFDREKTFGKRLDIASGTAVRFEPGEEKSVELIDIGGNRRIFGFNALVDRQADNESKKIALHRAKERGFHGAKSDDNYVKTIKE

SEQ ID NO: 8630 - protein, 619 aa, Helicobacter pylori
  misc_feature (B) LOCATION 1...619
  hypothetical: YES
VFVASKQADEQKKLVIEQEVQKRQFQKIEELKADMQKGVNPFFKVLFDGGNRLFGFPETFIYSSIFILFVTIVLSVILFQAYEPVLIVAIVIVLVALGFKKDYRLYQRMERAMKFKKPFLFKGVKNKAFMSIFSMKPSKEMANDIHLNPNREDRLVSAANSYLANNYECFLDDGVILTNNYSLLGTIKLGGIDFLTTSKKDLIELHASIYSVFRNFVTPEFKFYFHTVKKKIVIDETNRDYGLIFSNDFMRAYNEKQKRESFYDISFYLTIEQDLLDTLNEPVMNKKHFADNNFEEFQRIIRAKLENFKDRIELIEELLSKYHPTRLKEYTKDGIIYSKQCEFYNFLVGMNEAPFICNRKDLYLKEKMHGGVKEVYFANKHGKILNDDLSEKYFSAIEISEYAPKSQSDLFDKINALDSEFIFMHAYSPKNSQVLKDKLAFTSRRIIISGGSKEQGMTLGCLSELVGNGDITLGSYGNSLVLFADSFEKMKQSVKECVSSLNAKGFLANAATFSMENYFFAKHCSFITLPFIFDVTSNNFADFIAMRAMSFDGKEDNNAWGNSVMTLKSEINSPFYLNFHMPTDFGSASAGHTLILGSTGSGKNSVYVHDSKRYGAICL

SEQ ID NO: 8631 - protein, 983 aa, Helicobacter pylori
  misc_feature (B) LOCATION 1...983
  hypothetical: YES
VFVASKQADEQKKLVIEQEVQKRQFQKIEELKADMQKGVNPFFKVLFDGGNRLFGFPETFIYSSIFILFVTIVLSVILFQAYEPVLIVAIVIVLVALGFKKDYRLYQRMERAMKFKKPFLFKGVKNKAFMSIFSMKPSKEMANDIHLNPNREDRLVSAANSYLANNYECFLDDGVILTNNYSLLGTIKLGGIDFLTTSKKDLIELHASIYSVFRNFVTPEFKFYFHTVKKKIVIDETNRDYGLIFSNDFMRAYNEKQKRESFYDISFYLTIEQDLLDTLNEPVMNKKHFADNNFEEFQRIIRAKLENFKDRIELIEELLSKYHPTRLKEYTKDGIIYSKQCEFYNFLVGMNEAPFICNRKDLYLKEKMHGGVKEVYFANKHGKILNDDLSEKYFSAIEISEYAPKSQSDLFDKINALDSEFIFMHAYSPKNSQVLKDKLAFTSRRIIISGGSKEQGMTLGCLSELVGNGDITLGSYGNSLVLFADSFEKMKQSVKECVSSLNAKGFLANAATFSMENYFFAKHCSFITLPFIFDVTSNNFADFIAMRAMSFDGKEDNNAWGNSVMTLKSEINSPFYLNFHMPTDFGSASAGHTLILGSTGSGKTVFMSMTLNAMGQFAYNFPANISKDKQKLTMVYMDKDYGAYGNIVAMGGEYVKIELGTDTGLNPFAWAACVQKTNATMEQKQTAISVVKELVKNLATKSDEKDENGNSISFSLADSNTLAAAVTNLITGDMNLDYPITQLINAFGKDHNDPNGLVARLAPFCKSTNGEFQWLFDNKATDRLDFSKTIIGVDGSSFLDNNDVSPFICFYLFARIQEAMDGRRFVLDIDEAWKYLGDPKVAYFVRDMLKTARKRNAIVRLATQSITDLLACPIADTIREQCPTKIFLRNDGGNLSDYQRLANVTEKEFEIITKGLDRKILYKQDGSPSVIASFNLRGIPKEYLKILSTDTVFVKEIDKIIQNHSIIDKYQALRQMYQQIKEY

SEQ ID NO: 8632 - protein, 991 aa, Helicobacter pylori
  misc_feature (B) LOCATION 1...991
  hypothetical: YES
SGISIKRGVFVASKQADEQKKLVIEQEVQKRQFQKIEELKADMQKGVNPFFKVLFDGGNRLFGFPETFIYSSIFILFVTIVLSVILFQAYEPVLIVAIVIVLVALGFKKDYRLYQRMERAMKFKKPFLFKGVKNKAFMSIFSMKPSKEMANDIHLNPNREDRLVSAANSYLANNYECFLDDGVILTNNYSLLGTIKLGGIDFLTTSKKDLIELHASIYSVFRNFVTPEFKFYFHTVKKKIVIDETNRDYGLIFSNDFMRAYNEKQKRESFYDISFYLTIEQDLLDTLNEPVMNKKHFADNNFEEFQRIIRAKLENFKDRIELIEELLSKYHPTRLKEYTKDGIIYSKQCEFYNFLVGMNEAPFICNRKDLYLKEKMHGGVKEVYFANKHGKILNDDLSEKYFSAIEISEYAPKSQSDLFDKINALDSEFIFMHAYSPKNSQVLKDKLAFTSRRIIISGGSKEQGMTLGCLSELVGNGDITLGSYGNSLVLFADSFEKMKQSVKECVSSLNAKGFLANAATFSMENYFFAKHCSFITLPFIFDVTSNNFADFIAMRAMSFDGKEDNNAWGNSVMTLKSEINSPFYLNFHMPTDFGSASAGHTLILGSTGSGKTVFMSMTLNAMGQFAYNFPANISKDKQKLTMVYMDKDYGAYGNIVAMGGEYVKIELGTDTGLNPFAWAACVQKTNATMEQKQTAISVVKELVKNLATKSDEKDENGNSISFSLADSNTLAAAVTNLITGDMNLDYPITQLINAFGKDHNDPNGLVARLAPFCKSTNGEFQWLFDNKATDRLDFSKTIIGVDGSSFLDNNDVSPFICFYLFARIQEAMDGRRFVLDIDEAWKYLGDPKVAYFVRDMLKTARKRNAIVRLATQSITDLLACPIADTIREQCPTKIFLRNDGGNLSDYQRLANVTEKEFEIITKGLDRKILYKQDGSPSVIASFNLRGIPKEYLKILSTDTVFVKEIDKIIQNHSIIDKYQALRQMYQQIKEY

SEQ ID NO: 8633 - protein, 1167 aa, Helicobacter pylori
  misc_feature (B) LOCATION 1...1167
  hypothetical: YES
MTNEAINQQPQTEAAFNPQQFINNLQVAFIKVDNVVASFDPNQKPIVDKNDRDNRQAFEKISQLREEFANKAIKNPTKKNQYFSSFISKSNDLIDKDNLIDTGSSIKSFQKFGTQRYQIFMNWVSHQNDPSKINTQKIRGFMENIIQPPISDDKEKAEFLRSAKQAFAGIIIGNQIRSDQKFMGVFDESLKERQEAEKNGEPNGDPTGGDWLDIFLSFVFNKKQSSDLKETLNQEPVPHVQPDVATTTTDIQSLPPEARDLLDERGNFSKFTLGDMNMLDVEGVADIDPNYKFNQLLIHNNALSSVLMGSHNGIEPEKVSLLYGNNGGPEARHDWNATVGYKNQRGDNVATLINVHMKNGSGLVIAGGEKGINNPSFYLYKEDQLTGSQRALSQEEIQNKVDFMEFLAQNNAKLDNLSKKEKEKFQNEIEDFQKDSKAYLDALGNDHIAFVSKKDKKHLALVAEFGNGELSYTLKDYGKKADKALDREAKTTLQGSLKHDGVMFVDYSNFKYTNASKSPDKGVGATNGVSHLEAGFSKVAVFNLPNLNNLAITSVVRQDLEDKLIAKGLSPQEANKLVKDFLSSNKELVGKALNFNKAVAEAKNTGNYDEVKQAQKDLEKSLKKRERLEKDVAKNLESKSGNKNKMEAKSQANSQKDEIFALINKEANRDARAIAYAQNLKGIKRELSDKLENINKDLKDFSKSFDEFKNGKNKDFSKAEETLKALKGSVKDLGINPEWISKVENLNAALNEFKNGKNKDFSKVTQAKSDLENSIKDVIINQKITDKVDNLNQAVSVAKATGDFSGVEQALADLKNFSKEQLAQQAQKNEDFNTGKNSALYQSVKNGVNGTLVGNGLSKAEATTLSKNFSDIKKELNAKLGNFNNNNNNGLENSTEPIYTQVAKKVKAKIDRLDQIASGLGDVGQAASFLLKRHDKVDDLSKVGLSANHEPIYATIDDLGGPFPLKRHDKVDDLSKVGLSREQKLTQKIDNLNQAVSEAKASHFDNLDQMIDKLKDSTKKNVVNLYVESAKKVPTSLSAKLDNYATNSHTRINSNVKNGTINEKATGMLTQKNSEWLKLVNDKIVAHNVGSAPLSAYDKIGFNQKNMKDYSDSFKFSTRLSNAVKDIKSGFVQFLTNIFSMGSYSLMKASVEHGVKNTNTKGGFQKS

SEQ ID NO: 8634 - protein, 1178 aa, Helicobacter pylori
  misc_feature (B) LOCATION 1...1178
  hypothetical: YES
MIPNLDIEGETMTNEAINQQPQTEAAFNPQQFINNLQVAFIKVDNVVASFDPNQKPIVDKNDRDNRQAFEKISQLREEFANKAIKNPTKKNQYFSSFISKSNDLIDKDNLIDTGSSIKSFQKFGTQRYQIFMNWVSHQNDPSKINTQKIRGFMENIIQPPISDDKEKAEFLRSAKQAFAGIIIGNQIRSDQKFMGVFDESLKERQEAEKNGEPNGDPTGGDWLDIFLSFVFNKKQSSDLKETLNQEPVPHVQPDVATTTTDIQSLPPEARDLLDERGNFSKFTLGDMNMLDVEGVADIDPNYKFNQLLIHNNALSSVLMGSHNGIEPEKVSLLYGNNGGPEARHDWNATVGYKNQRGDNVATLINVHMKNGSGLVIAGGEKGINNPSFYLYKEDQLTGSQRALSQEEIQNKVDFMEFLAQNNAKLDNLSKKEKEKFQNEIEDFQKDSKAYLDALGNDHIAFVSKKDKKHLALVAEFGNGELSYTLKDYGKKADKALDREAKTTLQGSLKHDGVMFVDYSNFKYTNASKSPDKGVGATNGVSHLEAGFSKVAVFNLPNLNNLAITSVVRQDLEDKLIAKGLSPQEANKLVKDFLSSNKELVGKALNFNKAVAEAKNTGNYDEVKQAQKDLEKSLKKRERLEKDVAKNLESKSGNKNKMEAKSQANSQKDEIFALINKEANRDARAIAYAQNLKGIKRELSDKLENINKDLKDFSKSFDEFKNGKNKDFSKAEETLKALKGSVKDLGINPEWISKVENLNAALNEFKNGKNKDFSKVTQAKSDLENSIKDVIINQKITDKVDNLNQAVSVAKATGDFSGVEQALADLKNFSKEQLAQQAQKNEDFNTGKNSALYQSVKNGVNGTLVGNGLSKAEATTLSKNFSDIKKELNAKLGNFNNNNNNGLENSTEPIYTQVAKKVKAKIDRLDQIASGLGDVGQAASFLLKRHDKVDDLSKVGLSANHEPIYATIDDLGGPFPLKRHDKVDDLSKVGLSREQKLTQKIDNLNQAVSEAKASHFDNLDQMIDKLKDSTKKNVVNLYVESAKKVPTSLSAKLDNYATNSHTRINSNVKNGTINEKATGMLTQKNSEWLKLVNDKIVAHNVGSAPLSAYDKIGFNQKNMKDYSDSFKFSTRLSNAVKDIKSGFVQFLTNIFSMGSYSLMKASVEHGVKNTNTKGGFQKS

SEQ ID NO: 8635 - protein, 1183 aa, Helicobacter pylori
  misc_feature (B) LOCATION 1...1183
  hypothetical: YES
FLVALMIPNLDIEGETMTNEAINQQPQTEAAFNPQQFINNLQVAFIKVDNVVASFDPNQKPIVDKNDRDNRQAFEKISQLREEFANKAIKNPTKKNQYFSSFISKSNDLIDKDNLIDTGSSIKSFQKFGTQRYQIFMNWVSHQNDPSKINTQKIRGFMENIIQPPISDDKEKAEFLRSAKQAFAGIIIGNQIRSDQKFMGVFDESLKERQEAEKNGEPNGDPTGGDWLDIFLSFVFNKKQSSDLKETLNQEPVPHVQPDVATTTTDIQSLPPEARDLLDERGNFSKFTLGDMNMLDVEGVADIDPNYKFNQLLIHNNALSSVLMGSHNGIEPEKVSLLYGNNGGPEARHDWNATVGYKNQRGDNVATLINVHMKNGSGLVIAGGEKGINNPSFYLYKEDQLTGSQRALSQEEIQNKVDFMEFLAQNNAKLDNLSKKEKEKFQNEIEDFQKDSKAYLDALGNDHIAFVSKKDKKHLALVAEFGNGELSYTLKDYGKKADKALDREAKTTLQGSLKHDGVMFVDYSNFKYTNASKSPDKGVGATNGVSHLEAGFSKVAVFNLPNLNNLAITSVVRQDLEDKLIAKGLSPQEANKLVKDFLSSNKELVGKALNFNKAVAEAKNTGNYDEVKQAQKDLEKSLKKRERLEKDVAKNLESKSGNKNKMEAKSQANSQKDEIFALINKEANRDARAIAYAQNLKGIKRELSDKLENINKDLKDFSKSFDEFKNGKNKDFSKAEETLKALKGSVKDLGINPEWISKVENLNAALNEFKNGKNKDFSKVTQAKSDLENSIKDVIINQKITDKVDNLNQAVSVAKATGDFSGVEQALADLKNFSKEQLAQQAQKNEDFNTGKNSALYQSVKNGVNGTLVGNGLSKAEATTLSKNFSDIKKELNAKLGNFNNNNNNGLENSTEPIYTQVAKKVKAKIDRLDQIASGLGDVGQAASFLLKRHDKVDDLSKVGLSANHEPIYATIDDLGGPFPLKRHDKVDDLSKVGLSREQKLTQKIDNLNQAVSEAKASHFDNLDQMIDKLKDSTKKNVVNLYVESAKKVPTSLSAKLDNYATNSHTRINSNVKNGTINEKATGMLTQKNSEWLKLVNDKIVAHNVGSAPLSAYDKIGFNQKNMKDYSDSFKFSTRLSNAVKDIKSGFVQFLTNIFSMGSYSLMKASVEHGVKNTNTKGGFQKS

SEQ ID NO: 8636 - protein, 91 aa, Helicobacter pylori
  misc_feature (B) LOCATION 1...91
  hypothetical: YES
LRSEVEKCGFKNFDEIKIDTMDAFQGEEADIIIYSTVKTYGNLSFLLDSKRLNVAISRAKENLIFVGKKSFFENLRSDKDNIFNAILQVCR

SEQ ID NO: 8637 - protein, 142 aa, Helicobacter pylori
  misc_feature (B) LOCATION 1...142
  hypothetical: YES
REHQLEKTSSYNKDQVQKIIELLEQIDRALNQRKIRKTIGIITPYNAQKRRLRSEVEKCGFKNFDEIKIDTMDAFQGEEADIIIYSTVKTYGNLSFLLDSKRLNVAISRAKENLIFVGKKSFFENLRSDKDNIFNAILQVCR

SEQ ID NO: 8638 - protein, 274 aa, Helicobacter pylori
  misc_feature (B) LOCATION 1...274
  hypothetical: YES
LTHVFEVYPKVNVFLKILHKEGAYHKIISRMCLVKNKLKDIISVKNALSFSLKGDFDCPLEENSLFKALQVLKKFLVQKNFSHSVIKSLDTLAIEVEKNIPTQAGLGGGSADAGGLLYHLNQMFDWRLSLKELYTMGSLVGADTNFFISQYKSANATSYGEVIENFEEESLEDRLEIYAPNHVFCSTKAVYQAYKPETCFFQAKEWLKKTSLECLKTYDRNELNDLLKPALRTNPALKDIESQLSKEWFFSGSGSAFFRLKNTQKGANETHCQQ

SEQ ID NO: 8639 - protein, 275 aa, Helicobacter pylori
  misc_feature (B) LOCATION 1...275
  hypothetical: YES
ALTHVFEVYPKVNVFLKILHKEGAYHKIISRMCLVKNKLKDIISVKNALSFSLKGDFDCPLEENSLFKALQVLKKFLVQKNFSHSVIKSLDTLAIEVEKNIPTQAGLGGGSADAGGLLYHLNQMFDWRLSLKELYTMGSLVGADTNFFISQYKSANATSYGEVIENFEEESLEDRLEIYAPNHVFCSTKAVYQAYKPETCFFQAKEWLKKTSLECLKTYDRNELNDLLKPALRTNPALKDIESQLSKEWFFSGSGSAFFRLKNTQKGANETHCQQ

SEQ ID NO: 8640 - protein, 258 aa, Helicobacter pylori
  misc_feature (B) LOCATION 1...258
  hypothetical: YES
MQNPIEIKAKTLEEALIQASIALNCPIINLQYEVIQMPSKGFLNIGKKEAIILVGVKESVKEVKEESVKEIHQNAEEKQSLGIKTPQEEIITPKPPKKTPKEESHNGDKLHEIKQELKDLFSHLPYKINKVEVSLYEPGVLLIDIDGEDSALLIGEKGYRYKALSYLLFNWIHPAYGYSIHLEISTFLQNQEKVMEAQLQSTIMTVHEVGKGQMKAPDGVLTYIALKKLRKAFPNKYVSIKTNLNDEKYIVINDFNNE

SEQ ID NO: 8641 - protein, 265 aa, Helicobacter pylori
  misc_feature (B) LOCATION 1...265
  hypothetical: YES
RNNKGKLMQNPIEIKAKTLEEALIQASIALNCPIINLQYEVIQMPSKGFLNIGKKEAIILVGVKESVKEVKEESVKEIHQNAEEKQSLGIKTPQEEIITPKPPKKTPKEESHNGDKLHEIKQELKDLFSHLPYKINKVEVSLYEPGVLLIDIDGEDSALLIGEKGYRYKALSYLLFNWIHPAYGYSIHLEISTFLQNQEKVMEAQLQSTIMTVHEVGKGQMKAPDGVLTYIALKKLRKAFPNKYVSIKTNLNDEKYIVINDFNNE

SEQ ID NO: 8642 - protein, 152 aa, Helicobacter pylori
  misc_feature (B) LOCATION 1...152
  hypothetical: YES
MKLIASNKKAYFDYEILETLEAGLALLGSEVKALRQTRVNLKDNFVKIIKGEAFLFGVHISYLDTIHAYYKPNERRERKLLLHKKQLLKWQMEASKERLSIVGLKLYFNQKNRAKIQIALVKGKRLHDKRQSLKEKALNKEILADLKHHFKG

SEQ ID NO: 8643 - protein, 159 aa, Helicobacter pylori
  misc_feature (B) LOCATION 1...159
  hypothetical: YES
KILKRERMKLIASNKKAYFDYEILETLEAGLALLGSEVKALRQTRVNLKDNFVKIIKGEAFLFGVHISYLDTIHAYYKPNERRERKLLLHKKQLLKWQMEASKERLSIVGLKLYFNQKNRAKIQIALVKGKRLHDKRQSLKEKALNKEILADLKHHFKG

SEQ ID NO: 8644 - protein, 62 aa, Helicobacter pylori
  misc_feature (B) LOCATION 1...62
  hypothetical: YES
RVRVEGFSLRINQFLAHYTKHSRREAEKLVLEGRVKINHEHAKLASVVKENDKVFLDKRLIK

SEQ ID NO: 8645 - protein, 262 aa, Helicobacter pylori
  misc_feature (B) LOCATION 1...262
  hypothetical: YES
VEGFSLRINQFLAHYTKHSRREAEKLVLEGRVKINHEHAKLASVVKENDKVFLDKRLIKPLKNKKFSVLVYHKPKGELVSKADPLKRHVIYESLEKKYAHFAPVGRLDFASEGVLLLSDSKAVVSALMHANLEKEYLVKIQGFVTREMENAMQEGLKLENATKGAHQKTPIKSMEFAPFIGYEIIKNHAKYSKLRVIINEGKNRELRRFFAFFNAGVLDLRRVRYGFVNLNALPVGKARFLNRQEYNELHAFMANRANVKGD

SEQ ID NO: 8646 - protein, 84 aa, Helicobacter pylori
  misc_feature (B) LOCATION 1...84
  hypothetical: YES
VLVVGKPNESYADTHARIEHFIKLVDFKGEIVFINEDNSSVEAYENLEHLGKKNKRIATKDGRLDSLSACRILERYCQQVLKKG

SEQ ID NO: 8647 - protein, 134 aa, Helicobacter pylori
  misc_feature (B) LOCATION 1...134
  hypothetical: YES
MILACDVGLKRIGIAALLNGVILPLEAILRHNRNQASRDLSDLLRKKDIQVLVVGKPNESYADTHARIEHFIKLVDFKGEIVFINEDNSSVEAYENLEHLGKKNKRIATKDGRLDSLSACRILERYCQQVLKKG

SEQ ID NO: 8648 - protein, 143 aa, Helicobacter pylori
  misc_feature (B) LOCATION 1...143
  hypothetical: YES
AHQSSRGVSMILACDVGLKRIGIAALLNGVILPLEAILRHNRNQASRDLSDLLRKKDIQVLVVGKPNESYADTHARIEHFIKLVDFKGEIVFINEDNSSVEAYENLEHLGKKNKRIATKDGRLDSLSACRILERYCQQVLKKG

SEQ ID NO: 8649 - protein, 109 aa, Helicobacter pylori
  misc_feature (B) LOCATION 1...109
  hypothetical: YES
PMKIMHQVKDFLDFCKQTIHKNSNEAFQKTKRALFKEKSQKIREQAVKIVEKRLIKENMQLSDFNEEELKIMFEAEEKRLLEQIHAKELKEKQEKTTKHFKEVWEKGDQ

SEQ ID NO: 8650 - protein, 112 aa, Helicobacter pylori
  misc_feature (B) LOCATION 1...112
  hypothetical: YES
MKIMHQVKDFLDFCKQTIHKNSNEAFQKTKRALFKEKSQKIREQAVKIVEKRLIKENMQLSDFNEEELKIMFEAEEKRLLEQIHAKELKEKQEKTTKHFKEVWEKGDNEQEK

SEQ ID NO: 8651 - protein, 262 aa, Helicobacter pylori
  misc_feature (B) LOCATION 1...262
  hypothetical: YES
MANQTPKELFDLGVKSNKAKDFIQAKKYFEKACNLNYGGGCGALGDLYDDGKGVEKNLIKAAQPYTKACELKEGLGCERLWSLYYYGRGVEKNLIKAAQYASKACDLNNGVGCKNLGFLYEYGEGVEKDLIKAAQYASKACDLNNGSGCDVLGFLYGSGKGVEKNLTKAAYFYSKACDLNEGLGCFNLGGLYNGQGVEKDLTKVAYLYSKACELKESFGCGALAVLYINGQGVEKDLTKADQYISKACKLGDQEACEALKEK

SEQ ID NO: 8652 - protein, 281 aa, Helicobacter pylori
  misc_feature (B) LOCATION 1...281
  hypothetical: YES
EISKKRFLGFYAWVYWGGLMANQTPKELFDLGVKSNKAKDFIQAKKYFEKACNLNYGGGCGALGDLYDDGKGVEKNLIKAAQPYTKACELKEGLGCERLWSLYYYGRGVEKNLIKAAQYASKACDLNNGVGCKNLGFLYEYGEGVEKDLIKAAQYASKACDLNNGSGCDVLGFLYGSGKGVEKNLTKAAYFYSKACDLNEGLGCFNLGGLYNGQGVEKDLTKVAYLYSKACELKESFGCGALAVLYINGQGVEKDLTKADQYISKACKLGDQEACEALKEK

SEQ ID NO: 8653 - protein, 180 aa, Helicobacter pylori
  misc_feature (B) LOCATION 1...180
  hypothetical: YES
LKKNYSYKNIQAIDFTQLNDEEKLLVLEFRNHPNTALWMYSANISLKTHLQFIEDLKNSPSHRYFLFKEESVYLGVGSITKINFFHKHGYLGIYKNPFLKNKGGTILKALERIAFEEFQLNSLHLEVMENNFKAIAFYEKNHYELEGRLKGFISKDKEFIDVLLYYKDKKGYNDQSPLKL

SEQ ID NO: 8654 - protein, 191 aa, Helicobacter pylori
  misc_feature (B) LOCATION 1...191
  hypothetical: YES
ARGRIEGVFRNLKKNYSYKNIQAIDFTQLNDEEKLLVLEFRNHPNTALWMYSANISLKTHLQFIEDLKNSPSHRYFLFKEESVYLGVGSITKINFFHKHGYLGIYKNPFLKNKGGTILKALERIAFEEFQLNSLHLEVMENNFKAIAFYEKNHYELEGRLKGFISKDKEFIDVLLYYKDKKGYNDQSPLKL

SEQ ID NO: 8655 - protein, 77 aa, Helicobacter pylori
  misc_feature (B) LOCATION 1...77
  hypothetical: YES
MSLFDFFKNKGSAATATDRLKLILAKERTLNLPYMEEMRKEIIAVIQKYTKSSDIHFKTLDGNQSVETIEVEIILPK

SEQ ID NO: 8656 - protein, 84 aa, Helicobacter pylori
  misc_feature (B) LOCATION 1...84
  hypothetical: YES
RVKRDIFMSLFDFFKNKGSAATATDRLKLILAKERTLNLPYMEEMRKEIIAVIQKYTKSSDIHFKTLDGNQSVETIEVEIILPK

SEQ ID NO: 8657 - protein, 167 aa, Helicobacter pylori
  misc_feature (B) LOCATION 1...167
  hypothetical: YES
LSSRFEEFFKLITPGVFFEELGINYIGHINVHDLGTIIETLKLAKELKEPVIIHAQTLKGKGYKIAEGRYEKWHGVGLFDLDTGLSKKSKSATLSPTEAYSNTLLELAKKDEKIVGVTAAMPSGTGLDKLIDAYPLRFFDVAIAEQHALILAAVWLKRGLNILRHLW

SEQ ID NO: 8658 - protein, 215 aa, Helicobacter pylori
  misc_feature (B) LOCATION 1...215
  hypothetical: YES
GVILQNKTFDLNPNDIAGLELVCQTLRNRILEVVSANGGHLSSSLGAVELIVGMHALFDCQKNPFIFDTSHQAYAHKLLTGRFESFSTLRQFQGLSGFTKPSESAYDYFIAGHSSTSVSIGVGVAKAFRLKQTLGMPIALLGDGSISAGIFYEALNELGDRKYPMIMILNDNEMSISTPIGALSKALSQLMKGPFYQSFRSKVKKILSTLPEIVN

SEQ ID NO: 8659 - protein, 543 aa, Helicobacter pylori
  misc_feature (B) LOCATION 1...543
  hypothetical: YES
LQNKTFDLNPNDIAGLELVCQTLRNRILEVVSANGGHLSSSLGAVELIVGMHALFDCQKNPFIFDTSHQAYAHKLLTGRFESFSTLRQFQGLSGFTKPSESAYDYFIAGHSSTSVSIGVGVAKAFRLKQTLGMPIALLGDGSISAGIFYEALNELGDRKYPMIMILNDNEMSISTPIGALSKALSQLMKGPFYQSFRSKVKKILSTLPESVNYLASRFEESFKLITPGVFFEELGINYIGPINGHDLGTIIETLKLAKELKEPVLIHAQTLKGKGYKIAEGRYEKWHGVGPFDLDTGLSKKSKSATLSPTEAYSNTLLELAKKDEKIVGVTAAMPSGTGLDKLIDAYPLRFFDVAIAEQHALTSSSAMAKEGFKPFVSIYSTFLQRAYDSIVHDACISSLPIKLAIDRAGIVGEDGETHQGLLDVSYLRSIPNMVIFAPRDNETLKNAVYFANEHDSSPCAFRYPRGSFALKEGVFEPSGFVLGRSELLKKEGEILLIGYGNGVGRAHLVQLALKEKNIECALLDLRFLKPLDHNLSAIYLPL

SEQ ID NO: 8660 - protein, 95 aa, Helicobacter pylori
  misc_feature (B) LOCATION 1...95
  hypothetical: YES
GNPPDRLKPSRCFGYGEMIALQHMLKILCLPLIGIIPEDHHIISATNKGEPVIRTDCESAKAYQRITRRILGEEVEYVELKAKRGFFSALKGIFS

SEQ ID NO: 8661 - protein, 94 aa, Helicobacter pylori
  misc_feature (B) LOCATION 1...94
  hypothetical: YES
NPPDRLKPSRCFGYGEMIALQHMLKILCLPLIGIIPEDHHIISATNKGEPVIRTDCESAKAYQRITRRILGEEVEYVELKAKRGFFSALKGIFS

SEQ ID NO: 8662 - protein, 268 aa, Helicobacter pylori
  misc_feature (B) LOCATION 1...268
  hypothetical: YES
MAIVVTITSGKGGVGKSTTTANLAIGLAESGKKVVAVDFDIGLRNLDMILGLENRIVYDVVDVMEKNCNLSQALITDKKTKNLSFLAASQSKDKNILDKEKVAILINALRADFDYILIDSPAGIESGFEHAILHADMALVVVTPEVSSLRDSDRVIGIIDAKSNRAKSGEEVHKHLIINRLKPELVANGEMISIEEVLKILCLPLIGIIPEDHHIISATNKGEPVIRTDCESAKAYQRITRRILGEEVEYVEFKAKRGFFSALKGIFS

SEQ ID NO: 8663 - protein, 81 aa, Helicobacter pylori
  misc_feature (B) LOCATION 1...81
  hypothetical: YES
PHSPGRTHQIRLHLSSVDHRIVGEGLYGVADENAREYLQLKRENNAPTLMLHAASLEFEFKGAHYKIASPMPERFMPFLKD

SEQ ID NO: 8664 - protein, 247 aa, Helicobacter pylori
  misc_feature (B) LOCATION 1...247
  hypothetical: YES
KFVVVPFVEEEFEILKPTKALFLVRDVLKCSLKEAQRHLDKQRLKQNQQTVRKSQIIQGVVRLIYFKPNEKQEKLVFEAKDFGVFDKPAQIYTHPKGYFYHESLLDCIQSHFGKNAHPAHRLDYETSGLVLAGKTLQSTKDLKALFMQKKVKKTYLALATGLVDKSIIINKPILTPQNIQKDLRIRSQISPLGKPSITLVEPLSYNPFLDISLLKITPLTGAHAPDPLAFKQRGSQDRGRGALWGGR

SEQ ID NO: 8665 - protein, 293 aa, Helicobacter pylori
  misc_feature (B) LOCATION 1...293
  hypothetical: YES
VPFVEEEFEILKPTKALFLVRDVLKCSLKEAQRHLDKQRLKQNQQTVRKSQIIQGVVRLIYFKPNEKQEKLVFEAKDFGVFDKPAQIYTHPKGYFYHESLLDCIQSHFGKNAHPAHRLDYETSGLVLAGKTLQSTKDLKALFMQKKVKKTYLALAHGLVDKSIIINKPILTPQNIQKDLRIRSQISPLGKPSITLVEPLSYNPFLDISLLKITPLTGRTHQIRLHLSSVDHRIVGEGLYGVADENAREYLQLKRENNAPTLMLHAASLEFEFKGAHYKIASPMPERFMPFLKD

SEQ ID NO: 8666 - protein, 68 aa, Helicobacter pylori
  misc_feature (B) LOCATION 1...68
  hypothetical: YES
GPSNPVKPLSALKLAKGSKNPVYINCNDMRLNQNILSSWLLKWHLEKKMDLLILDRIERLDFSLPKAP

SEQ ID NO: 8667 - protein, 95 aa, Helicobacter pylori
  misc_feature (B) LOCATION 1...95
  hypothetical: YES
PLILKTIKPNCILCDFALPYSLTPSPSLLNVFENMVFLELYKQFPNYELYAHDNGIFILRNPTSKLALIAHAFPTPHFLEKQLLWVVPPLGFFIK

SEQ ID NO: 8668 - protein, 138 aa, Helicobacter pylori
  misc_feature (B) LOCATION 1...138
  hypothetical: YES
QRPILAYGYALGLNFKEYISFFKPNTPKNTLFNRFLRDGNALDSLFTENEQEKILKKQENIQLAFQAYAPLMAKICSYQSKFVSAFYLYTQLKKELKTSKDTLYKLLHALEKQRIIFLAPNFENHKTKLYSVRFCPAL

SEQ ID NO: 8669 - protein, 361 aa, Helicobacter pylori
  misc_feature (B) LOCATION 1...361
  hypothetical: YES
MPLSCLHPFGPFETPKEPALNNPLLKAHSSDKICLLGPMKSGKTTFALKLAKGFKNPVYINCNDMRLNQNILSSWLLKWHLEKKMDLLILDRIERLDFSLPKLPKIVLIPNYLSHITAPNFSLCYALGLNFKEYISFFKPNTPKNTLFNRFLRDGNALDSLFTENEQEKILKKQENIQLAFQAYAPLMAKICSYQSKFVSAFYLYTQLKKELKTSKDTLYKLLHALEKQRIIFLAPNFENHKTKLYLCDFALPYSLTPSPSLLNVFENMVFLELYKQFPNYELYAHDNGIFILRNPTSKLALIAHAFPTPHFLEKQLLWCHKHGFLKIAVVSINAPISANNPPYKHLNFIDFSLDIQSILV

SEQ ID NO: 8670 - protein, 99 aa, Helicobacter pylori
  misc_feature (B) LOCATION 1...99
  hypothetical: YES
MLAWMSCSLKKVALGRKSFMAFLRLMLDSSNATTCAFLDATTKISISLGNFSKNRKARGIPLAPLMPKTNFMNILYKICALELLNTFAFKILLLSKFFA

SEQ ID NO: 8671 - protein, 103 aa, Helicobacter pylori
  misc_feature (B) LOCATION 1...103
  hypothetical: YES
LPEAMLAWMSCSLKKVALGRKSFMAFLRLMLDSSNATTCAFLDATTKTSISLGNFSKNRKARGIPLAPLMPKTNFMNILYKICALELLNTFAFKILLLSKFFA

SEQ ID NO: 8672 - protein, 203 aa, Helicobacter pylori
  misc_feature (B) LOCATION 1...203
  hypothetical: YES
MQKFDYEFKKRALIKEGFLAFKQAHYAEALRLFSEVLFLDKDNQKAKVGALLSDIAKDFPKEAHSFYELYQSLIAMQKRSLKNQAEEQITALIASFDEGLNQMAEKIDAQISQKGEELNGILYADFKRLSLERGFKEAFGDLMFSSRVIFDNKEDFYEFLKELNHYGYYELAVNYIENMHEDSFIYDEFLRSLLEDALKSNKA

SEQ ID NO: 8673 - protein, 205 aa, Helicobacter pylori
  misc_feature (B) LOCATION 1...205
  hypothetical: YES
LGMQKFDYEFKKRALIKEGFLAFKQAHYAEALRLFSEVLFLDKDNQKAKVGALLSDIAKDFPKEAHSFYELYQSLIAMQKRSLKNQAEEQITALIASFDEGLNQMAEKIDAQISQKGEELNGILYADFKRLSLERGFKEAFGDLMFSSRVIFDNKEDFYEFLKELNHYGYYELAVNYIENMHEDSFIYDEFLRSLLEDALKSNKA

SEQ ID NO: 8674 - protein, 119 aa, Helicobacter pylori
  misc_feature (B) LOCATION 1...119
  hypothetical: YES
VKILQEQGLNTPLYGIAIDDKIKSFYSHSAALLKGFCQGNLKATYGRLRANNAVSYAGKSLEFRANNPRNFTFRGDESLDYFLLDDIITTGTTLKEALKYLKTLNIKAHFAIALCSADE

SEQ ID NO: 8675 - protein, 191 aa, Helicobacter pylori
  misc_feature (B) LOCATION 1...191
  hypothetical: YES
MRCLTCLKLSFKPLCPNCLNDLPLSLKLRVLEGVSVYSFYAYSEIEELIKSKYALIGSRILPLLSQKAGAEFVKILQEQGLNTPLYGIAIDDKIKSFYSHSAALLKGFCQGNLKATYGRLRANNAVSYAGKSLEFRANNPRNFTFRGDESLDYFLLDDIITTGTTLKEALKYLKTLNIKAHFAIALCSADE

SEQ ID NO: 8676 - protein, 246 aa, Helicobacter pylori
  misc_feature (B) LOCATION 1...246
  hypothetical: YES
MKKENRLKQEKIINMFDDIASSYDQANRLMSFGLDVKWRQRACEHAFLFLENKKALRLVDVACGTGDMLVAWQKSALNCGIEFKECLGIDPSNNMLELAIKKCEELENKASFIQAQAKDLKGVENNSVDILSIAYGLRNIVERQEALKEFFRVLKTRGVLVILEFLKKDNPTWLDKISGFYTNKVLPLVGGAISKNYGAYSYLPQSIEGFLSLEGLKNELKNAGFEILRTEDSIAQISTTMLVKKS

SEQ ID NO: 8677 - protein, 89 aa, Helicobacter pylori
  misc_feature (B) LOCATION 1...89
  hypothetical: YES
MIEFSDEDLQKPVRIVIEKIRPYLLKDGGNIEVLGVKSMKIYVALEGACKTCSSSKITLKNVIERQLKMDIHPNLEVVCLENAKEFDKL

SEQ ID NO: 8678 - protein, 99 aa, Helicobacter pylori
  misc_feature (B) LOCATION 1...99
  hypothetical: YES
SKILKIRFLKMIEFSDEDLQKPVRIVIEKIRPYLLKDGGNIEVLGVKSMKIYVALEGACKTCSSSKITLKNVIERQLKMDIHPNLEVVCLENAKEFDKL

SEQ ID NO: 8679 - protein, 86 aa, Helicobacter pylori
  misc_feature (B) LOCATION 1...86
  hypothetical: YES
MQDELFETEKAPQKNAKNAKNAPKKSFEEHVHSLERVIDRLNDPNLSLKDGMDLYKTAMQELFLAQKLLENAYSEYEKLQTPNKKA

SEQ ID NO: 8680 - protein, 89 aa, Helicobacter pylori
  misc_feature (B) LOCATION 1...89
  hypothetical: YES
RNVMQDELFETEKAPQKNAKNAKNAPKKSFEEHVHSLERVIDRLNDPNLSLKDGMDLYKTAMQELFLAQKLLENAYSEYEKLQTPNKKA

SEQ ID NO: 8681 - protein, 259 aa, Helicobacter pylori
  misc_feature (B) LOCATION 1...259
  hypothetical: YES
MHSEEELKIIVGESLREGIIDSVEGEIIKNAVDFSDTSAKEIMTPRKDMVCLDEENSYEENIDIVLKSHFTRYPYCKGSKDNIIGMVHIRDLLSRSIFTPKMHDFKQIVRKMIIVPESASISQILIKMKKEQIHTALVIDEYGGTAGLLTMEDIIEEIMGEISDEYDLKQEGVNKLEEGVFELEGMLDLESVEEVLHIQFDKECEQVTLGGYVFSLLERMPIEGDTIVSHGYAFEVLSVDGARIKRLKAVKQDQGENEA

SEQ ID NO: 8682 - protein, 189 aa, Helicobacter pylori
  misc_feature (B) LOCATION 1...189
  hypothetical: YES
KRLNTSSPPSTRLKRLRFLGYLMPFDNFEKTLLQLKKEHFKAAHFVTAFRYSLEGKITEGFSDDGEPKASSGMPVLSVLRREDLINIGLVSVRYFGGTLLGVGGLMKAYAKSALLCVENAQRENAFKDFVELETLSAYYSYKELDALQREIKKFSLQLSKKNFSNQSVEVEISGTRDDLQAFLQQNKIN

SEQ ID NO: 8683 - protein, 190 aa, Helicobacter pylori
  misc_feature (B) LOCATION 1...190
  hypothetical: YES
VKTLKHLITSKHQIKASRFLGYLMPFDNFEKTLLQLKKEHFKAAHFVTAFRYSLEGKITEGFSDDGEPKGSSGMPVLSVLRREDLINIGLVSVRYFGGTLLGVGGLMKAYAKSALLCVENAQRENAFKDFVELETLSAYYSYKELDALQREIKKFSLQLSKKNFSNQSVEVEISGTRDDLQAFLQQNKIN

SEQ ID NO: 8684 - protein, 64 aa, Helicobacter pylori
  misc_feature (B) LOCATION 1...64
  hypothetical: YES
PKRAKCDLYLCGYWPKRIHRCASGPQIRRIRSDGIQRRDQCFGFRLSCDAIFSPLCGCGYGGIF

SEQ ID NO: 8685 - protein, 97 aa, Helicobacter pylori
  misc_feature (B) LOCATION 1...97
  hypothetical: YES
MIDQLQIVPKAQVLKNNTMERSLALALQKVSIPRSTSAHRTLLINHFLEQVILQNIKTIAFRGIIKLTPHNENPLLKPYSAFITLNSIIRACAYCPL

SEQ ID NO: 8686 - protein, 73 aa, Helicobacter pylori
  misc_feature (B) LOCATION 1...73
  hypothetical: YES
WQYRLSKISSKHSSGVVMAKNKVLGRGLADIFPEINEVYEQGLYERANRVVELGIDEVMPNPYQPRKIFSEKS

SEQ ID NO: 8687 - protein, 74 aa, Helicobacter pylori
  misc_feature (B) LOCATION 1...74
  hypothetical: YES
WQYRLSKISSKHSSGVVMAKNKVLGRGLADIFPEINEVYEQGLYERANRVVELGIDEVMPNPYQPRKIFSEKSL

SEQ ID NO: 8688 - protein, 124 aa, Helicobacter pylori
  misc_feature (B) LOCATION 1...124
  hypothetical: YES
MAKNKVLGRGLADIFPEINEVYEQGLYERANRVVELGIDEVMPNPYQPRKIFSEDSLEELAQSIKEHGLLQPVLVVSENGRYHLIAGERRLRASKLAKMPTIKAIVVDIEQEKMREVALIENIQ

SEQ ID NO: 8689 - protein, 160 aa, Helicobacter pylori
  misc_feature (B) LOCATION 1...160
  hypothetical: YES
LELARSYKELLESYQMTQEELSKIVKKSRAHVANIMRLLTLSSKVQNALLEEKITSGHAKVLVGLEEEKQELILNSIIGQKLSVRQTEDLARDFKINANFDNKKHGFKQTQTLIAEDELERFNQSLWDRYKLKAALKGKKIVLRCYKNSLLEAFMKKMMS

SEQ ID NO: 8690 - protein, 165 aa, Helicobacter pylori
  misc_feature (B) LOCATION 1...165
  hypothetical: YES
EDLNPLELARSYKELLESYQMTQEELSKIVKKSRAHVANIMRLLTLSSKVQNALLEEKITSGHAKVLVGLEEEKQELILNSIIGQKLSVRQTEDLARDFKINANFDNKKHGFKQTQTLIAEDELERFNQSLWDRYKLKAALKGKKIVLRCYKNSLLEAFMKKMMS

SEQ ID NO: 8691 - protein, 290 aa, Helicobacter pylori
  misc_feature (B) LOCATION 1...290
  hypothetical: YES
MAKNKVLGRGLADIFPEINEVYEQGLYERANRVVELGIDEVMPNPYQPRKIFSEDSLEELAQSIKEHGLLQPVLVVSENGRYHLIAGERRLRASKLAKMPTIKAIVVDIEQEKMREVALIENIQREDLNPLELARSYKELLESYQMTQEELSKIVKKSRAHVANIMRLLTLSSKVQNALLEEKITSGHAKVLVGLEEEKQELILNSIIGQKLSVRQTEDLARDFKINANFDNKKHGFKQTQTLIAEDELERFNQSLWDRYKLKAALKGKKIVLRCYKNSLLEAFMKKMMS

SEQ ID NO: 8692 - protein, 83 aa, Helicobacter pylori
  misc_feature (B) LOCATION 1...83
  hypothetical: YES
AKYLLVNKTKNGIDICLNTAETRAKGLVMVVLHSHLENALNQLKELIDLTERDIRDIKLAKHAEIFERNHQKQLAIQAFEQEK

SEQ ID NO: 8693 - protein, 144 aa, Helicobacter pylori
  misc_feature (B) LOCATION 1...144
  hypothetical: YES
MVVLHSHLENALNQLKELIDLTERDIRDIKLAKHAEIFERNHQKQLAIQAFEQEKTNIDAQMLSLKNQFPNKEMSELLDEKTSDFLNQMREFLLVLKEKNLIYSRMAFAVSEFYSSLIQQIIPHDTCDYKGSRHVGSHFLRVQA

SEQ ID NO: 8694 - protein, 759 aa, Helicobacter pylori
  misc_feature (B) LOCATION 1...759
  hypothetical: YES
MLGENMGNKDKQQQNVSSGISQISLKKVATFDENGASFENLKSINFIYGANGSGKTTTSSFLKNLAENGIEDKFANSKIAWYNNESLKIEVYNKQFKEEQLRNSQVKGIFTLGKKTNENLEKIESKKESINKENEKKIKNEASLQVLTQKKEKEEKDFTDSCWKNLYKKNEEEFKEILEGFKRKEKFKGKILKEFENDKHNQSEIVGLEKLKEKIEIVFSKNQTELALLECDLTDFDSIENHSIWEQKIVGSGDVAIANLIKTLSNEDWVAQGREYVKDNSICPFCQKETITEEFKKQLESYFDTSYQESTDTIKKMKEDYTNKTDEALERLDEIIKTEQNNSQTKLDTENLKRIIETLRSKIKANQQKMIDKSKEMSRNFKLDSNKNEIDAIKDLIKKANEQITNHNETIKDIEKQKKSCKEQTWKFLINEFKSDIQEYNKKYCGLEKGINNLEKEISENQEKVKKLENEIKELEKNMVSIKPIVNEINTLLKGYGFTNFSLACTEDEKFYRIQREDGQLVGETLSEGEVTFITFLYYYHLAKGSLKENDISKNKVLVIDDPISSLDSNILFMVSVLVKDLMKETMEEKTNIKQIIILTHNTYFYKEITLEYDLKRYQGKYSFWIIKKDNNVSKIKGYKENPIKNSYELLWQEVKQAKENNASWVSLQNIMRRIIEYYFRILGGFKHNDSLSECFENIEEERVCNSFISWLNDGSHGISDDLFVQSQDTSIETYLKVFEKTFKETGHEAHYKMMMRIK

SEQ ID NO: 8695 - protein, 762 aa, Helicobacter pylori
  misc_feature (B) LOCATION 1...762
  hypothetical: YES
GNIMLGENMGNKDKQQQNVSSGISQISLKKVATFDENGASFENLKSINFIYGANGSGKTTTSSFLKNLAENGIEDKFANSKIAWYNNESLKIEVYNKQFKEEQLRNSQVKGIFTLGKKTNENLEKIESKKESINKENEKKIKNEASLQVLTQKKEKEEKDFTDSCWKNLYKKNEEEFKEILEGFKRKEKFKGKILKEFENDKHNQSEIVGLEKLKEKIEIVFSKNQTELALLECDLTDFDSIENHSIWEQKIVGSGDVAIANLIKTLSNEDWVAQGREYVKDNSICPFCQKETITEEFKKQLESYFDTSYQESTDTIKKMKEDYTNKTDEALERLDEIIKTEQNNSQTKLDTENLKRIIETLRSKIKANQQKMIDKSKEMSRNFKLDSNKNEIDAIKDLIKKANEQITNHNETIKDIEKQKKSCKEQTWKFLINEFKSDIQEYNKKYCGLEKGINNLEKEISENQEKVKKLENEIKELEKNMVSIKPIVNEINTLLKGYGFTNFSLACTEDEKFYRIQREDGQLVGETLSEGEVTFITFLYYYHLAKGSLKENDISKNKVLVIDDPISSLDSNILFMVSVLVKDLMKETMEEKTNIKQIIILTHNTYFYKEITLEYDLKRYQGKYSFWIIKKDNNVSKIKGYKENPIKNSYELLWQEVKQAKENNASWVSLQNIMRRIIEYYFRILGGFKHNDSLSECFENIEEERVCNSFISWLNDGSHGISDDLFVQSQDTSIETYLKVFEKTFKETGHEAHYKMMMRIK

SEQ ID NO: 8696 - protein, 264 aa, Helicobacter pylori
  misc_feature (B) LOCATION 1...264
  hypothetical: YES
MMNEIIAVANQKGGVGKTTTAVNLAASLAAHEKKILLIDFDPQANATSSLGFRRDKIDYDIYHVLIGRKQISQVILKTQMPFLDLVPSNLGLAGFEKTFYDSQDENKRGELMLKNALGSVVKLYDYIIIDSPPALGPLTINSLSAAHSVIIPIQCEFFALEGTKLLLNTIRMLQKSTNPKLKIRGFLPTMHVPQLNLTKGVLAELFKYFDSEFFRDSATGEYIMIPKSVKLAESPSFGKPILLYDIKSNGSIAYQKLAQSILQG

SEQ ID NO: 8697 - protein, 267 aa, Helicobacter pylori
  misc_feature (B) LOCATION 1...267
  hypothetical: YES
DVSMMNEIIAVANQKGGVGKTTTAVNLAASLAAHEKKILLIDFDPQANATSSLGFRRDKIDYDIYHVLIGRKQISQVILKTQMPFLDLVPSNLGLAGFEKTFYDSQDENKRGELMLKNALGSVVKLYDYIIIDSPPALGPLTINSLSAAHSVIIPIQCEFFALEGTKLLLNTIRMLQKSTNPKLKIRGFLPTMHVPQLNLTKGVLAELFKYFDSEFFRDSATGEYIMIPKSVKLAESPSFGKPILLYDIKSNGSIAYQKLAQSILQG

SEQ ID NO: 8698 - protein, 203 aa, Helicobacter pylori
  misc_feature (B) LOCATION 1...203
  hypothetical: YES
IVLKRLKKGKEGAIAFKWGHTREFQNCGKIYYESKRTKEFQKAWVEKLKSDMREIGADVGVIVSEALPKEMERMGLFEGVWVCSFEEFKGLSAVLREGVIQVSLAKKSQENKGDKVNLLYHYLTSSEFSMQVNAIIEGFEQLRADLESEKRAMARIWKSREKQIEKVFESTINMYGSIKGIAGNAIGQVKALELGYDEGDLEN

SEQ ID NO: 8699 - protein, 254 aa, Helicobacter pylori
  misc_feature (B) LOCATION 1...254
  hypothetical: YES
GKPMQENQTIPFKRPKCQEPINVSEALYKQIESENQSRFLAQQKAFEKEVNEKRAQYQSYFKNLEQKEEALKERAKEQQAQFDEAVKQASALALQDERAKIIEEARKNAFLEQQKGLELLQKELDEKSKQVQELHQKEAEIERLKRENNEAESRLKAENEKKLNEKLELEREKIEKALHEKNELKFKQQEEQLEMLRNELKNAQRKAELSSQQFQGEVQELAIEEFLRQKFPLDSVEEIKKGQRGGDCIQVGTH

SEQ ID NO: 8700 - protein, 433 aa, Helicobacter pylori
  misc_feature (B) LOCATION 1...433
  hypothetical: YES
MQENQTIPFKCPKCQEPINVSEALYKQIESENQSRFLAQQKAFEKEVNEKRAQYQSYFKNLEQKEEALKERAKEQQAQFDEAVKQASALALQDERAKIIEEARKNAFLEQQKGLELLQKELDEKSKQVQELHQKEAEIERLKRENNEAESRLKAENEKKLNEKLELEREKIEKALHEKNELKFKQQEEQLEMLRNELKNAQRKAELSSQQFQGEVQELAIEEFLRQKFPLDSVEEIKKGQRGGDCIQVVHTREFQNCGKIYYESKRTKEFQKAWVEKLKSDMREIGADVGVIVSEALPKEMERMGLFEGVWVCSFEEFKGLSAVLREGVIQVSLAKKSQENKGDKVNLLYHYLTSSEFSMQVNAIIEGFEQLRADLESEKRAMARIWKSREKQIEKVFESTINMYGSIKGIAGNAIGQVKALELGYDEGDLEN

SEQ ID NO: 8701 - protein, 111 aa, Helicobacter pylori
  misc_feature (B) LOCATION 1...111
  hypothetical: YES
LAYEFTNKEQQELLAWFKCNKMLIVSDILKGRGEFSAEWVLVIQKINLNMKWALKNINEVMQHYLDDGIVEISKKGSLKIGRITIQRKGGDNGRESANMLQFKIDPTGLLG

SEQ ID NO: 8702 - protein, 110 aa, Helicobacter pylori
  misc_feature (B) LOCATION 1...110
  hypothetical: YES
AYEFTNKEQQELLAWFKCNKMLIVSDILKGRGEFSAEWVLVIQKINLNMKWALKNINEVMQHYLDDGIVEISKKGSLKIGRITIQRKGGDNGRESANMLQFKIDPTGLLG

SEQ ID NO: 8703 - protein, 194 aa, Helicobacter pylori
  misc_feature (B) LOCATION 1...194
  hypothetical: YES
VLSGYKADVNVIIQIKMKQTLDSENLQVKLVSNLKGFNQIDKRKLRSYQEMWNIPPNIYQLFAYFTGELKPTRQDIKYPNKRMLAYEFTNKEQQELLAWLNDNKMLIVSDILKGRGEFSAEWVLVIQKINLNMKWALKNINEVMQHYLDDGIVEISKKGSLKIGRITIQRKGGDNGRESANMLQFKIDPTGLLG

SEQ ID NO: 8704 - protein, 250 aa, Helicobacter pylori
  misc_feature (B) LOCATION 1...250
  hypothetical: YES
MNNHTSSFGSFIAKNGFLNEKEVAQKFNDYIHDRDAQIWLMIMGYDLNKIEYVKANVLSGYKADVNVIIQIKMKQTLDSENLQVKLVSNLKGFNQIDKRKLRSYQEMWNIPPNIYQLFAYFTGELKPTRQDIKYPNKRMLAYEFTNKEQQELLAWLNDNKMLIVSDILKGRGEFSAEWVLVIQKINLNMKWALKNINEVMQHYLDDGIVEISKKGSLKIGRITIQRKGGDNGRESANMLQFKIDPTGLLG

SEQ ID NO: 8705 - protein, 146 aa, Helicobacter pylori
  misc_feature (B) LOCATION 1...146
  hypothetical: YES
AREQNHMLIIHQTDACLNPGNSGGALIDSRGRLVGINTAIISKTGGNHGIGFAIPSNMVKDIVTQLIKTGKNEKSYLGVGLQNLSGDLQNSYDNKERAVVISVEKDSPAKKAGILVWDLITEVNGKKVKNTNELRTVAAPCYPIKE

SEQ ID NO: 8706 - protein, 145 aa, Helicobacter pylori
  misc_feature (B) LOCATION 1...145
  hypothetical: YES
REQNHMLIIHQTDACLNPGNSGGALIDSRGRLVGINTAIISKTGGNHGIGFAIPSNMVKDIVTQLIKTGKNEKSYLGVGLQNLSGDLQNSYDNKERAVVISVEKDSPAKKAGILVWDLITEVNGKKVKNTNELRTVAAPCYPIKE

SEQ ID NO: 8707 - protein, 177 aa, Helicobacter pylori
  misc_feature (B) LOCATION 1...177
  hypothetical: YES
MERALGSGVIISKDGYIVTNNHVIDGADKIKVTIPGSYKEYSATLVGTDSESDLAVIRITKDNLPTIKFSDSNDILVGDLVFAIGNPFGVGESVTQGIVSALNKSGIGINSYENFIQTDASINPGNSGGALIDSRGRLVGINTAIISKTGGNHGIGFAIPSNMVKDIVTQLIKTGKN

SEQ ID NO: 8708 - protein, 387 aa, Helicobacter pylori
  misc_feature (B) LOCATION 1...387
  hypothetical: YES
MIPKERMERALGSGVIISKDGYIVTNNHVIDGADKIKVTIPGSYKEYSATLVGTDSESDLAVIRITKDNLPTIKFSDSNDILVGDLVFAIGNPFGVGESVTQGIVSALNKSGIGINSYENFIQTDASINPGNSGGALIDSRGRLVGINTAIISKTGGNHGIGFAIPSNMVKDIVTQLIKTGKIERSYLGVGLQDLSGDLQNSYDNKEGAVVISVEKDSPAKKAGILVWDLITEVNGKKVKNTNELRNLIGSMLPNQRVTLKVIRDKKERTFTLTLAERKNPNKKETISAQNGVQGQLNGLQVEDLTQKTKRSMRLSDDVQGVLVSQVNENSPAEQAGFRQGNIITKIEEVEVKSVADFNHALEKYKGKPKRFLVLDLNQGYRIILVK

SEQ ID NO: 8709 - protein, 387 aa, Helicobacter pylori
  misc_feature (B) LOCATION 1...387
  hypothetical: YES
MIPKERMERALGSGVIISKDGYIVTNNHVIDGADKIKVTIPGSNKEYSATLVGTDSESDLAVIRITKDNLPTIKFSDSNDILVGDLVFAIGNPFGVGESVTQGIVSALNKSGIGINSYENFIQTDASINPGNSGGALIDSRGGLVGINTAIISKTGGNHGIGFAIPSNMVKDIVTQLIKTGKIERGYLGVGLQDLSGDLQNSYDNKEGAVVISVEKDSPAKKAGILVWDLITEVNGKKVKNTNELRNLIGSMLPNQRVTLKVIRDKKERTFTLTLAERKNPNKKETISAQNGVQGQLNGLQVEDLTQKTKRSMRLSDDVQGVLVSQVNENSPAEQAGFRQGNIITKIEEVEVKSVADFNHALEKYKGKPKRFLVLDLNQGYRIILVK

SEQ ID NO: 8710 - protein, 175 aa, Helicobacter pylori
  misc_feature (B) LOCATION 1...175
  hypothetical: YES
KYYRALSCIRCGTCLNHCPVYDKIGGHAYLSTYPGPIGVVVSPQLFGLNNYGHIPNLCSLCGRCTEVCPVEIPLAELIRDLRSDKVGEGRGVVKGAKSTQHSGMEKFSMKMFAKMASDGTKWRFQLKMAQFFSPLGKLLAPILPLVKEWASVRTLPNMDTSLHAKVQHLEGVIYE

SEQ ID NO: 8711 - protein, 323 aa, Helicobacter pylori
  misc_feature (B) LOCATION 1...323
  hypothetical: YES
GIIMEKYHSDQEYEEIITDQLGDMQLRENLRSAMDTLRANRKNLLKNRYSEWENLRELGKEVKLKILSRLDEYLELFEKNATQNGFKIHYAKDGDEANEIIYNLAKEKNIKRILKQKSMASEEIGLNHYLKEKGIQAQETDLGELIIQLINEHPVHIVVPAIHKNRKQIGKIFEEKLNAAYEEEPEKLNAIARKHMRKEFESFKMGISGVNFAIANEGAIWLVENEGNGRMSTTACDVHVAICGIEKLVESFDDAAILNNLLAPSAVGVPITCYQNIITGPRKNDDLDGPKETHIILLDNNRSNILADESIIALFHAFVAGLV

SEQ ID NO: 8712 - protein, 327 aa, Helicobacter pylori
  misc_feature (B) LOCATION 1...327
  hypothetical: YES
MEKYHSDQEYEEIITDQLGDMQLRENLRSAMDTLRANRKNLLKNRYSEWENLRELGKEVKLKILSRLDEYLELFEKNATQNGFKIHYAKDGDEANEIIYNLAKEKNIKRILKQKSMASEEIGLNHYLKEKGIQAQETDLGELIIQLINEHPVHIVVPAIHKNRKQIGKIFEEKLNAAYEEEPEKLNAIARKHMRKEFESFKMGISGVNFAIANEGAIWLVENEGNGRMSTTACDVHVAICGIEKLVESFDDAAILNNLLAPSAVGVPITCYQNIITGPRKNDDLDGPKETHIILLDNNRSNILADRKVLSRSFMHSLRDLFEPLPCV

SEQ ID NO: 8713 - protein, 481 aa, Helicobacter pylori
  misc_feature (B) LOCATION 1...481
  hypothetical: YES
MEKYHSDQEYEEIITDQLGDMQLRENLRSAMDTLRANRKNLLKNRYSEWENLRELGKEVKLKILSRLDEYLELFEKNATQNGFKIHYAKDGDEANEIIYNLAKEKNIKRILKQKSMASEEIGLNHYLKEKGIQAQETDLGELIIQLINEHPVHIVVPAIHKNRKQIGKIFEEKLNAAYEEEPEKLNAIARKHMRKEFESFKMGISGVNFAIANEGAIWLVENEGNGRMSTTACDVHVAICGIEKLVESFDDAAILNNLLAPSAVGVPITCYQNIITGPRKNDDLDGPKETHIILLDNNRSNILADEKYYRALSCIRCGTCLNHCPVYDKIGGHAYLSTYPGPIGVVVSPQLFGLNNYGHIPNLCSLCGRCTEVCPVEIPLAELIRDLRSDKVGEGRGVVKGAKSTQHSGMEKFSMKMFAKMASDGTKWRFQLKMAQFFSPLGKLLAPILPLVKEWASVRTLPNMDTSLHAKVQHLEGVIYE

SEQ ID NO: 8714 - protein, 56 aa, Helicobacter pylori
  misc_feature (B) LOCATION 1...56
  hypothetical: YES
RIRMEKLEVGQLAPDFRLKNSDGVEISLKDLLHKKVVLYFYPKDNTPGCTLESQRF

SEQ ID NO: 8715 - protein, 91 aa, Helicobacter pylori
  misc_feature (B) LOCATION 1...91
  hypothetical: YES
KEKRCCRGRKPDNSQSHQKFIRQCSLNVILLCDEDKKVANLYKAYGKRMLYGKEHLGIIRSTFIINTQGVLEKCFYNVKAKGHAQKVLESL

SEQ ID NO: 8716 - protein, 152 aa, Helicobacter pylori
  misc_feature (B) LOCATION 1...152
  hypothetical: YES
MEKLEVGQLAPDFRLKNSDGVEISLKDLLHKKVVLYFYPKDNTPGCTLEAKDFSALFSEFEKKNAVVVGVSPDNSQSHQKFISQCSLNVILLCDEDKKVANLYKAYGKRMLYGKEHLGIIRSTFIINTQGVLEKCFYNVKAKGHAQKVLESL

SEQ ID NO: 8717 - protein, 779 aa, Helicobacter pylori
  misc_feature (B) LOCATION 1...779
  hypothetical: YES
MFEMATGSGKTLVMAGLILECYKQGYQNFIFFVNSASILEKTKLNFTDSVSSKYLFSENININDENTEIKSINNLNESHNNAINIYFSTIQGLFSLFTRAKENAITLEDLKDQKLVFLADEAHHLNTETKKKLNDSEASEKRNWESVVKLALEQNKDNLLLEFSATIPKEKSVEDKYENLKVVTYTLKQFSEDKFCKNIYSLSYENKELETRFLGACVSSLYKELLAQHHNIENFKPCILFKSERIEESKKNQERFNAFLENLSFLDLENFFNHSRNAFFKAAKSFFDEQNHTPNLVALLQNKFKESVQINTNNEKELEKSMLLLNSLEDRDNPKRVIFSVDKLNEGWDVLNLFDIVRLKNKANQKDTIKDAQLIGRGARYYPFSYNDFKPSRIEFYQRKFDLANPLSTLERLDYHAIYNSEFIAKLNKGLQDLGLGLIEKEKTTIPLTPTKRFKCYYASNTKDKKKNLFNMDYSDPVEAKLKSLHVPLFAFGVREKQVDFKEENKGDRTYYMPHTLDKIPINYFLKALNLKNLDFKTLKKAFKKHAFNNKVGFIEQYISPLKTNFHKNQKFDDNKILLQLAVYIIENLKDTLLKEQDKPSVSTLELKEFETHNKSLSASEWEKDIPPYEWLLFKDMRKLDSDLEREFLGFINDHKELLDKKFKEWCVLRNDYFTELKVFCNIEGPFYAQGFEPDFILFAQTHEDEFLGFTCYMEVKGEHLEPSNAWKKEFLEMLENATLKSHNKKLHLKGLPFFTLHNSVFNGDFQTAFHQTFKDKEC

SEQ ID NO: 8718 - protein, 849 aa, Helicobacter pylori
  misc_feature (B) LOCATION 1...849
  hypothetical: YES
GISCKIHSHLLPPPQSAIKDRTPNNAPNNKEIELPTHITSNLKKELRDYQKQAIDSYLEKRQFNPTQKHFMFEMATGSGKTLVMAGLILECYKQGYQNFIFFVNSASILEKTKLNFTDSVSSKYLFSENININDENTEIKSINNLNESHNNAINIYFSTIQGLFSLFTRAKENAITLEDLKDQKLVFLADEAHHLNTETKKKLNDSEASEKRNWESVVKLALEQNKDNLLLEFSATIPKEKSVEDKYENLKVVTYTLKQFSEDKFCKNIYSLSYENKELETRFLGACVSSLYKELLAQHHNIENFKPCILFKSERIEESKKNQERFNAFLENLSFLDLENFFNHSRNAFFKAAKSFFDEQNHTPNLVALLQNKFKESVQINTNNEKELEKSMLLLNSLEDRDNPKRVIFSVDKLNEGWDVLNLFDIVRLKNKANQKDTIKDAQLIGRGARYYPFSYNDFKPSRIEFYQRKFDLANPLSTLERLDYHAIYNSEFIAKLNKGLQDLGLGLIEKEKTTIPLTPTKRFKCYYASNTKDKKKNLFNMDYSDPVEAKLKSLHVPLFAFGVREKQVDFKEENKGDRTYYMPHTLDKIPINYFLKALNLKNLDFKTLKKAFKKHAFNNKVGFIEQYISPLKTNFHKNQKFDDNKILLQLAVYIIENLKDTLLKEQDKPSVSTLELKEFETHNKSLSASEWEKDIPPYEWLLFKDMRKLDSDLEREFLGFINDHKELLDKKFKEWCVLRNDYFTELKVFCNIEGPFYAQGFEPDFILFAQTHEDEFLGFTCYMEVKGEHLEPSNAWKKEFLEMLENATLKSHNKKLHLKGLPFFTLHNSVFNGDFQTAFHQTFKDKEC

SEQ ID NO: 8719 - protein, 133 aa, Helicobacter pylori
  misc_feature (B) LOCATION 1...133
  hypothetical: YES
MQSPMIFDVKAPILGFETIHKMHLQKIDEIFLRLNSAEDNSVVSFTLVNPFALRKYEFEVPTPLKILLELEGAKSVLVANIMVVQTPIELSTVNYLAPLIFNLDKQLMGQVVLDSKKYPHYHLRENILSHTHE

SEQ ID NO: 8720 - protein, 135 aa, Helicobacter pylori
  misc_feature (B) LOCATION 1...135
  hypothetical: YES
RECNRPMIFDVKAPILGFETIHKMHLQKIDEIFLRLNSAEDNSVVSFTLVNPFALRKYEFEVPTPLKILLELEGAKSVLVANIMVVQTPIELSTVNYLAPLIFNLDKQLMGQVVLDSKKYPHYHLRENILSHTHE

SEQ ID NO: 8721 - protein, 287 aa, Helicobacter pylori
  misc_feature (B) LOCATION 1...287
  hypothetical: YES
MKIFKNWLCFSLIAMSWLQADMLDNFTKAINSYTAKKLNEIKDQVNSANPTKNHNPTHNANGMLTNIDCKVLKNNFYSVCYSSELKNPIYGVSVLFGDLVDKNNIEKRYEFKPDTRLAEYQQAVTQDYTRSGFDRGHFVANDASFDFASNPLRETYRMTNITPEAKNTNRHSVLLVEKEGRNLARKYHQVLVEELTIIKQGYRTFSSKNIAIPSGFWYHYDTSLTDSYENAKSECFYIPNDNQKYPLQEMRRDCKEYERVEKQVVFKNNKNAELNELPKYMNNSKKY

SEQ ID NO: 8722 - protein, 288 aa, Helicobacter pylori
  misc_feature (B) LOCATION 1...288
  hypothetical: YES
NMKIFKNWLCFSLIAMSWLQADMLDNFTKAINSYTAKKLNEIKDQVNSANPTKNHNPTHNANGMLTNIDCKVLKNNFYSVCYSSELKNPIYGVSVLFGDLVDKNNIEKRYEFKPDTRLAEYQQAVTQDYTRSGFDRGHFVANDASFDFASNPLRETYRMTNITPEAKNTNRHSVLLVEKEGRNLARKYHQVLVEELTIIKQGYRTFSSKNIAIPSGFWYHYDTSLTDSYENAKSECFYIPNDNQKYPLQEMRRDCKEYERVEKQVVFKNNKNAELNELPKYMNNSKKY

SEQ ID NO: 8723 - protein, 344 aa, Helicobacter pylori
  misc_feature (B) LOCATION 1...344
  hypothetical: YES
MSLNEREIVRSFGNYMQEWLYGEKGYYRKALIGPKGDFYTSVSLSKFFGGAIAFYIIRLLEEEKLFLPLKIVEIGSHHGHFLSDIASFLNALSVGVMEKCEFVSCEPLKELQNIQRTIFKQATQLDLISCALEELDFKEKKSAFVVSNELFDAFACEIIKDNQMLFITHDHQGVWGGIDEPTKELLKNLNLKEGCAPLFLEAFIKNLLEKLNEASSWVFLSFDYGDELERKDMHLRAFKNHQALDFKDILNHLASLYQQSDLTYDVNFSLVRFLFEKHHAQFSFFKTQANALLDMGLMELLETFSKSVGYERYLKEAAKIKPLISPGGLGERFKALEFVKKNKM

SEQ ID NO: 8724 - protein, 353 aa, Helicobacter pylori
  misc_feature (B) LOCATION 1...353
  hypothetical: YES
NSGLLWLVKMSLNEREIVRSFGNYMQEWLYGEKGYYRKALIGPKGDFYTSVSLSKFFGGAIAFYIIRLLEEEKLFLPLKIVEIGSHHGHFLSDIASFLNALSVGVMEKCEFVSCEPLKELQNIQRTIFKQATQLDLISCALEELDFKEKKSAFVVSNELFDAFACEIIKDNQMLFITHDHQGVWGGIDEPTKELLKNLNLKEGCAPLFLEAFIKNLLEKLNEASSWVFLSFDYGDELERKDMHLRAFKNHQALDFKDILNHLASLYQQSDLTYDVNFSLVRFLFEKHHAQFSFFKTQANALLDMGLMELLETFSKSVGYERYLKEAAKIKPLISPGGLGERFKALEFVKKNKM

SEQ ID NO: 8725 - protein, 273 aa, Helicobacter pylori
  misc_feature (B) LOCATION 1...273
  hypothetical: YES
LRVFIISLNQKVCDKFGLVFRDTTTLLNNINATHHQAQIFDAIYSKTFEGGLHPLVKKHLHPYFITQNIKDMGIATSLISEVSKFYYALKYHAKFMSLGELGCYASHYSLWQKCIELNEAICILEDDITLKEDFKEGLDFLEKHIQELGYARLMHLLYDASVKSEPLNHKNQEIQERVGIIKAYSHGVGTQGYVITPKIAKVFLKHSRKWVVPVDTIMDATFIHGVKNLVLQPFVIADDEQISTIARKEEPYSPKIALMRELHFKFLKWWQFV

SEQ ID NO: 8726 - protein, 279 aa, Helicobacter pylori
  misc_feature (B) LOCATION 1...279
  hypothetical: YES
KLWEFSLRVFIISLNQKVCDKFGLVFRDTTTLLNNINATHHQAQIFDAIYSKTFEGGLHPLVKKHLHPYFITQNIKDMGIATSLISEVSKFYYALKYHAKFMSLGELGCYASHYSLWQKCIELNEAICILEDDITLKEDFKEGLDFLEKHIQELGYARLMHLLYDASVKSEPLNHENQEIQERVGIIKAYSHGVGTQGYVITPKIAKVFLKHSRKWVVPVDTIMDATFIHGVKNLVLQPFVIADDEQISTIARKEEPYSPKIALMRELHFKFLKWWQFV

SEQ ID NO: 8727 - protein, 108 aa, Helicobacter pylori
  misc_feature (B) LOCATION 1...108
  hypothetical: YES
LKIFLSCKSLLIQRSLEFYLSDCLSPVEVCDLVLSDDEKLETNKPLCFIEERLRKPFTKQSVKEDIKNFYRALKISEKPCEEIQFSKEQKIKQLLEEYTHKLCQIISQ

SEQ ID NO: 8728 - protein, 114 aa, Helicobacter pylori
  misc_feature (B) LOCATION 1...114
  hypothetical: YES
WDKGGFLKIFLSCKSLLIQRSLEFYLSDCLSPVEVCDLVLSDDEKLETNKPLCFIEERLRKPFTKQSVKEDIKNFYRALKISEKPCEEIQFSKEQKIKQLLEEYTHKLCQIISQ

SEQ ID NO: 8729 - protein, 153 aa, Helicobacter pylori
  misc_feature (B) LOCATION 1...153
  hypothetical: YES
MEQNIFSLLIQKKSYKKLETLLKLKKLKVFMPLSLQENLLFIFIKDSKLLFAFKDLWASKEFNQRFAKEISHFLNTQGHACGLDELDALEILGYVPKDSLEKANFYAPIKKQAQFYRPSALGLFHNPIKDARLHECFEKARALIHYQRSFFEE

SEQ ID NO: 8730 - protein, 156 aa, Helicobacter pylori
  misc_feature (B) LOCATION 1...156
  hypothetical: YES
DRFMEQNIFSLLIQKKSYKKLETLLKLKKLKVFMPLSLQENLLFIFIKDSKLLFAFKDLWASKEFNQRFAKEISHFLNTQGHACGLDELDALEILGYVPKDSLEKANFYAPIKKQAQFYRPSALGLFHNPIKDARLHECFEKARALIHYQRSFFEE

SEQ ID NO: 8731 - protein, 93 aa, Helicobacter pylori
  misc_feature (B) LOCATION 1...93
  hypothetical: YES
MLALEIYIDICLKDALIDYLFEKGFDDFFYVECYKYAASSLLLSQKEQVSGRKDYAKFKLFLSEEVALPLAQALKNQFASKEMKLFYSQTHGL

SEQ ID NO: 8732 - protein, 244 aa, Helicobacter pylori
  misc_feature (B) LOCATION 1...244
  hypothetical: YES
LTPPGVNDPIASREERTKALLKDCDVVFIVSPSGQFLTDSDMSLFDRVSHKEGLQEIYFVASQADSAVGSMSEVEKSNHHLPTAFENAQKSLSSQLNNIMGALIEKYPNQREVFEKAKQNGVILTSGVCFSMHKDFENQASWERNQKTEEYHNALRNLRDSYPDAFSSDDKSKESSLFLINMGAIEERLKKAAQEKEKIMSQKLQNYAESQANNLHSFITQLLQDLEEEKRGLKTLTLALSKSK

SEQ ID NO: 8733 - protein, 244 aa, Helicobacter pylori; identical to SEQ ID NO: 8732
  misc_feature (B) LOCATION 1...244
  hypothetical: YES

SEQ ID NO: 8734 - protein, 226 aa, Helicobacter pylori
  misc_feature (B) LOCATION 1...226
  hypothetical: YES
MSINFFNDKFSTTENHHNIEPVSLKERYDLIARILNAKTSNEGLEEYQSILANEFLKFASGVDSLKEKEIALLMLQEIQKELQLVASYPSLFQKTIVAVGGGFSAGKSTFLNNLLGLKLKLPEDMNPTTAIPTYCLKGEREVLMGFSQNGGMVELPHLAFDHQFLKSLGFNLKEIMPFMLLSAPSVPFEFLCFIDTPGFNPANQGYTGGDKEASKESLKHAKHIKR

SEQ ID NO: 8735 - protein, 264 aa, Helicobacter pylori
  misc_feature (B) LOCATION 1...264
  hypothetical: YES
WGAFKTPTRHAKFAQSSAKQSAIHRSIRRKNQRFKGDPMSINFFNDKFSTTENHHNIEPVSLKERYDLIARILNAKTSNEGLEEYQSILANEFLKFASGVDSLKEKEIALLMLQEIQKELQLVASYPSLFQKTIVAVGGGFSAGKSTFLNNLLGLKLKLPEDMNPTTAIPTYCLKGEREVLMGFSQNGGMVELPHLAFDHQFLKSLGFNLKEIMPFMLLSAPSVPFEFLCFIDTPGFNPANQGYTGGDKEASKESLKHAKHIKR

SEQ ID NO: 8736 - protein, 132 aa, Helicobacter pylori
  misc_feature (B) LOCATION 1...132
  hypothetical: YES
MKFREAYEEFILHFINNIRVGLEETLKKAIQTAKVGAEEEGVERYTERVEQGGLGGWARWFGSVFGEKDWGYEEVGRTRAVIKAGAVLDYLTEMHGSCEGALNDSANSPKSLSQKNSTLKSFLNCVKSSLMI

SEQ ID NO: 8737 - protein, 155 aa, Helicobacter pylori
  misc_feature (B) LOCATION 1...155
  hypothetical: YES
RAFKKSRPRERKNHVSKIAKLCREPSKQPPFIHNAVVARFGRRKKRVKNADISAIKKQIEAYEKLSGNIEMKFREAYEEFILHFINNIRVGLEETLKKAIQTAKVGAEEEGVERYTERVEQAVGGCHMAWSFLVKRWSYRSRRTSSDYAGRCLII

SEQ ID NO: 8738 - protein, 106 aa, Helicobacter pylori
  misc_feature (B) LOCATION 1...106
  hypothetical: YES
CAVRKIKLSLGVGQLACVRSAQMIKDLAFVCGSGASMFSSLKAQSCLITGDVKYHDAMIAQSLGISLIDATHYYSERGFALIVAEILHSFNYLVTIENFKNPLQII

SEQ ID NO: 8739 - protein, 155 aa, Helicobacter pylori
  misc_feature (B) LOCATION 1...155
  hypothetical: YES
QRLKMALVKEVLEVLNRLSPFELQESWDNSGLNVGSGNSEFSQIIACLEITLQIALNAQENALIITHHPLIFKPLKTLNDEAYPGNILKILIQKNISVISMHTNFDKTHLNKHFARALLRFDGLIEKGLMLVKENANIEFDVLLEKSNCLWGWDN

SEQ ID NO: 8740 - protein, 243 aa, Helicobacter pylori
  misc_feature (B) LOCATION 1...243
  hypothetical: YES
MALVKEVLEVLNRLSPFELQESWDNSGLNVGSGNSEFSQIIACLEITLQIALNAQENALIITHHPLIFKPLKTLNDEAYPGNILKILIQKNISVISMHTNFDKTHLNKHFARALLRFDGLIEKGLMLVKENANIEFDVLLEKIKLSLGVGQLACVKSSQMIKDLAFVCGSGASMFSSLKAQSCLITGDVKYHDAMIAQSLGISLIDATHYYSERGFALIVAEILHSFNYLVTIENFKNPLQII

SEQ ID NO: 8741 - protein, 106 aa, Helicobacter pylori
  misc_feature (B) LOCATION 1...106
  hypothetical: YES
LREWRDLKNTPEEENYREFEEIKKMVLYFRDWCMFRLDWYKLRQEEIQKHRDLMDNDNRLLQLDYSLKNLSILKRFKEINEKNYQDHLNNEKLQNDLREWRRSKRR

SEQ ID NO: 8742 - protein, 135 aa, Helicobacter pylori
  misc_feature (B) LOCATION 1...135
  hypothetical: YES
KICKRLGRLKEEADNNYQESLNDEKLQNNLREWRDLKNTPEEENYREFEEIKKMVLYFRDWCMFRLDWYKLRQEEIQKHRDLMDNDNRLLQLDYSLKNLSILKRFKEINEKNYQDHLNNEKLQNDLREWRRSKRR

SEQ ID NO: 8743 - protein, 168 aa, Helicobacter pylori
  misc_feature (B) LOCATION 1...168
  hypothetical: YES
VCLAYEKAIKQDASKFKRYQKALHSVKLDLMQKGFDDFSDATFNKIHSLKKEFSEQERSKEEGLVRLNEVIGLFKESVDKVFDRVSAFTWEKYKAKNEDEEDDEANYREFEKIKKMALYFRDYCMFCLDWYELSQEKIQEEYRDCIDYDNKLLQLHYSLENLQTLRET

SEQ ID NO: 8744 - protein, 231 aa, Helicobacter pylori
  misc_feature (B) LOCATION 1...231
  hypothetical: YES
STPNTLKDNGIEFKGICAYSATRYQEYKEFSEKSKVFNSLEKFLKKLNQRSEKQNEILSVLYGVCLAYEKAIKQDASKFKRYQKALHSVKLDLMQKGFDDFSDATFNKIHSLKKEFSEQERSKEEGLVRLNEVIGLFKESVDKVFDRVSAFTWEKYKAKNEDEEDDEANYREFEKIKKMALYFRDYCMFCLDWYELSQEKIQEEYRDCIDYDNKLLQLHYSLENLQTLRET

SEQ ID NO: 8745 - protein, 294 aa, Helicobacter pylori
  misc_feature (B) LOCATION 1...294
  hypothetical: YES
VCLAYEKAIKQDASKFKRYQKALHSVKLDLMQKGFDDFSDATFNKIHSLKKEFSEQERSKEEGLVRLNEVIGLFKESVDKVFDRVSAFTWEKYKAKNEDEEDDEANYREFEKIKKMALYFRDYCMFCLDWYELSQEKIQEEYRDCIDYDNKLLQLHYSLENLQTLRELKEEADNNYQESLNDEKLQNNLREWRDLKNTPEEENYREFEEIKKMVLYFRDWCMFRLDWYKLRQEEIQKHRDLMDNDNRLLQLDYSLKNLSILKRFKEINEKNYQDHLNNEKLQNDLREWRRSKRR

SEQ ID NO: 8746 - protein, 116 aa, Helicobacter pylori
  misc_feature (B) LOCATION 1...116
  hypothetical: YES
LLKGLLTLLPNIIASFFRNEEKERAKLENLIEVKVIPEVQYKLKKVLPGLFNECLENSLKGLKDRCELEITHKKQEIALAQKEKEKHLNDLEDQKQILENKINALSDLEQQYLKDQ

SEQ ID NO: 8747 - protein, 115 aa, Helicobacter pylori
  misc_feature (B) LOCATION 1...115
  hypothetical: YES
LKGLLTLLPNIIASFFRNEEKERAKLENLIEVKVIPEVQYKLKKVLPGLFNECLENSLKGLKDRCELEITHKKQEIALAQKEKEKHLNDLEDQKQILENKINALSDLEQQYLKDQ

SEQ ID NO: 8748 - protein, 186 aa, Helicobacter pylori
  misc_feature (B) LOCATION 1...186
  hypothetical: YES
GVKNLLEFDKGLSFILSKTNLRTPSQVGEISHYIQEQIQDHLDLTTHLIHSNKDNNALLEVADKIDAEKLFSALYLKRLKFLNSQLQNSLKSVIESFDYSKEKALEEIKALDLGVKDIEKTYEKLRANLEEEYSSVAVNSVVKKVIEEVRDQKPYLASLIDKPNEFNSEIESVMQRNLIENAKLRD

SEQ ID NO: 8749 - protein, 340 aa, Helicobacter pylori
  misc_feature (B) LOCATION 1...340
  hypothetical: YES
VGEISHYIQEQIQDHLDLTTHLIHSNKDNNALLEVADKIDAEKLFSALYLKRLKFLNSQLQNSLKSVIESFDYSKEKALEEIKALDLGVKDIEKTYEKLRANLEEEYSSVAVNSVVKKVIEEVRDQKPYLASLINKPNEFNSEIESIMQQNLIKNAKLEIEKINLSFSKDFCAEFASLNNTQLSSGLSVNLEHGLELGINALSVILAKNPVTRPFALILQGLKPLLKDLLTLLPNIIASFFRNEEKERAKLENLIEVKVIPEVQYKLKKVLPGLFNECLENSLKGLKDRCELEITHKKQEIALAQKEKEKHLNDLEDQKQILENKINALSDLEQQYLKDQ

SEQ ID NO: 8750 - protein, 351 aa, Helicobacter pylori
  misc_feature (B) LOCATION 1...351
  hypothetical: YES
LSKTNLRTPSQVGEISHYIQEQIQDHLDLTTHLIHSNKDNNALLEVADKIDAEKLFSALYLKRLKFLNSQLQNSLKSVIESFDYSKEKALEEIKALDLGVKDIEKTYEKLRANLEEEYSSVAVNSVVKKVIEEVRDQKPYLASLINKPNEFNSEIESIMQQNLIKNAKLEIEKINLSFSKDFCAEFASLNNTQLSSGLSVNLEHGLELGINALSVILAKNPVTRPFALILQGLKPLLKDLLTLLPNIIASFFRNEEKERAKLENLIEVKVIPEVQYKLKKVLPGLFNECLENSLKGLKDRCELEITHKKQEIALAQKEKEKHLNDLEDQKQILENKINALSDLEQQYLKDQ

SEQ ID NO: 8751 - protein, 252 aa, Helicobacter pylori
  misc_feature (B) LOCATION 1...252
  hypothetical: YES
TYYCKMVSFTINEIRNLMEIAVFGGGAWGRALAFAFGEKNEVKIISRRDLNEPLKKLNDALISKGSAPIEQVDLERGLKAALYVIAISVQHLREWFQNASLPKNAKVLIASKGIEVLNKAFVSEIAKDFIDPNALCFLAGPSFAAEIIQGLPCALVIHSNNQALALEFANKTPSFIRAYAQQDIIGGEIAGAYKNVIAIAGGVCDGLKLGNSAKASLLSRGLVEMQRFGAFFGGKTETFLGLSGAGEIVFNR

SEQ ID NO: 8752 - protein, 259 aa, Helicobacter pylori
  misc_feature (B) LOCATION 1...259
  hypothetical: YES
MEIAVFGGGAWGRALAFAFGEKNEVKIISRRDLNEPLKKLNDALISKGSAPIEQVDLERGLKAALYVIAISVQHLREWFQNASLPKNAKVLIASKGIEVLNKAFVSEIAKDFIDPNALCFLAGPSFAAEIIQGLPCALVIHSNNQALALEFANKTPSFIRAYAQQDIIGGEIAGAYKNVIAIAGGVCDGLKLGNSAKASLLSRGLVEMQRFGAFFGGKTETFLGLSGAGDLFLTANSILSRNYRVGMGLSQNKPLEVVL

SEQ ID NO: 8753 - protein, 324 aa, Helicobacter pylori
  misc_feature (B) LOCATION 1...324
  hypothetical: YES
MVSFTINEIRNLMEIAVFGGGAWGRALAFAFGEKNEVKIISRRDLNEPLKKLNDALISKGSAPIEQVDLERGLKAALYVIAISVQHLREWFQNASLPKNAKVLIASKGIEVLNKAFVSEIAKDFIDPNALCFLAGPSFAAEIIQGLPCALVIHSNNQALALEFANKTPSFIRAYAQQDIIGGEIAGAYKNVIAIAGGVCDGLKLGNSAKASLLSRGLVEMQRFGAFFGGKTETFLGLSGAGDLFLTANSILSRNYRVGLGLAQNKPLEVVLEELGEVAEGVKTTNAIVEIARKYGIYTPIASELALLLKGKSVLESMNDLIRRA

SEQ ID NO: 8754 - protein, 151 aa, Helicobacter pylori
  misc_feature (B) LOCATION 1...151
  hypothetical: YES
LMRCVVYSIAKNSPLELVKSYQKQCKRFDCELELVDLFPKNTANAQKVSKELAQKSYSLAFEPYLSPKAKNIALHPEAQRGDSFAFSKMLENHLNINFFIAGAYGFEEKFLKDCQAWSLSEMTFSHEVAKIVLCEQIYRALSIIFKHPYHK

SEQ ID NO: 8755 - protein, 163 aa, Helicobacter pylori
  misc_feature (B) LOCATION 1...163
  hypothetical: YES
RIRLQRFFKVLRLMRCVVYSIAKNSPLELVKSYQKQCKRFDCELELVDLFPKNTANAQKVSKELAQKSYSLAFEPYLSPKAKNIALHPEAQRGDSFAFSKMLENHLNINFFIAGAYGFEEKFLKDCQAWSLSEMTFSHEVAKIVLCEQIYRALSIIFKHPYHK

SEQ ID NO: 8756 - protein, 120 aa, Helicobacter pylori
  misc_feature (B) LOCATION 1...120
  hypothetical: YES
GETSGRSSVSVVLDKGSNTILATALLDEGNYHVGEMVEMYIQGSQPKDSVLIPSNALIRNGKDYLVFVRTPKGFRPVVVQVLEERSKIFIVNAQNLHPNDSVAVGSLIGLKGMINNLGEE

SEQ ID NO: 8757 - protein, 143 aa, Helicobacter pylori
  misc_feature (B) LOCATION 1...143
  hypothetical: YES
EKNLQPMGLKVIKLDKEIFSKGLPFNAYIDFDSKSSVVQSLSFDASVVAVYKREGEQVKAGDAICEVSSIDLSNLYFELQNNQNKLKIAKDITKKDLELYRVGVIPKREYQTSFLASQEMGLKVEQLESAFKSFGVDSKNPKG

SEQ ID NO: 8758 - protein, 142 aa, Helicobacter pylori
  misc_feature (B) LOCATION 1...142
  hypothetical: YES
KNLQPMGLKVIKLDKEIFSKGLPFNAYIDFDSKSSVVQSLSFDASVVAVYKREGEQVKAGDAICEVSSIDLSNLYFELQNNQNKLKIAKDITKKDLELYRVGVIPKREYQTSFLASQEMGLKVEQLESAFKSFGVDSKNPKG

SEQ ID NO: 8759 - protein, 325 aa, Helicobacter pylori
  misc_feature (B) LOCATION 1...325
  hypothetical: YES
LQPMGLKVIKLDKEIFSKGLPFNAYIDFDSKSSVVQSLSFDASVVAVYKREGEQVKAGDAICEVSSIDLSNLYFELQNNQNKLKIAKDITKKDLELYRAGVIPKREYQTSFLASQEMGLKVEQLESAFKSFGVDPKNPKGHYGFRIVASDSGLLALAPKNVGEKILAFTSYVRISKSDDLIAQIKLPVGVSKSIKRDSPVYNEEGEKIGKIQSVSVVLDKGSNTILATALLDEGNYHVGEMVEMYIQGSQPKDSVLIPSNALIRNGKDYLVFVRTPKGFRPVVVQVLEERSKIFIVNAQNLHPNDSVAVGSLIGLKGMINNLGEE

SEQ ID NO: 8760 - protein, 359 aa, Helicobacter pylori
  misc_feature (B) LOCATION 1...359
  hypothetical: YES
LKRALLWFMLMGVFSMGVSLKAKEYPEIVLEEKNLQPMGLKVIKLDKEIFSKGLPFNAYIDFDSKSSVVQSLSFDASVVAVYKREGEQVKAGDAICEVSSIDLSNLYFELQNNQNKLKIAKDITKKDLELYRAGVIPKREYQTSFLASQEMGLKVEQLESAFKSFGVDPKNPKGHYGFRIVASDSGLLALAPKNVGEKILAFTSYVRISKSDDLIAQIKLPVGVSKSIKRDSPVYNEEGEKIGKIQSVSVVLDKGSNTILATALLDEGNYHVGEMVEMYIQGSQPKDSVLIPSNALIRNGKDYLVFVRTPKGFRPVVVQVLEERSKIFIVNAQNLHPNDSVAVGSLIGLKGMINNLGEE

SEQ ID NO: 8761 - protein, 90 aa, Helicobacter pylori
  misc_feature (B) LOCATION 1...90
  hypothetical: YES
RFRRSKTNLRKQDQRFKRSRTTIFKGSIMNAQELIKKSTLIEKVLQEQGLQEKAKPFMSDNAVIKTEELEKTLKEMQAEDRALKSVSSGM

SEQ ID NO: 8762 - protein, 207 aa, Helicobacter pylori
  misc_feature (B) LOCATION 1...207
  hypothetical: YES
VGIIGHVKAGKSSLLNALIFEGVEVLPKAATPMTASLTILKYANTLSAEVEFYSLKDIAELENEHEKYEREFNRIVEEEVKKQKEKQSLSNRAKEGIRNVGNKMLGRNKSDEEIEKRAERIAKNELEKDTKLVSSHDQYEKIKKSGSLNTKNLDPRIQANSLQELNQKLLQFVGADGKYMPYTKAVRISLNNPNLKDLEVIDTPRSE

SEQ ID NO: 8763 - protein, 263 aa, Helicobacter pylori
  misc_feature (B) LOCATION 1...263
  hypothetical: YES
MNAQELIKKSTLIEKVLQEQGLQEKAKPFMSDNAVIKTEELEKTLKEMQAEDRDLKVGIIGHVKAGKSSLLNALIFEGVEVLPKAATPMTASLTILKYANTLSAEVEFYSLKDIAELENEHEKYEREFNRIVEEEVKKQKEKQSLSNRAKEGIRNVGNKMLGRNKSDEEIEKRAERIAKNELEKDTKLVSSHDQYEKIKKSGSLNTKNLDPRIQANSLQELNQKLLQFVGADGKYMPYTKAVRISLNNPNLKDLEVIDTPRSE

SEQ ID NO: 8764 - protein, 116 aa, Helicobacter pylori
  misc_feature (B) LOCATION 1...116
  hypothetical: YES
RINMEKAYKLLSVQENISHKKAKALIDSGLVSIGGQKLMVARKELPQNTRFSVQKVEKPSVIFEDENILALFKPLIIESYDLVSFFKGWALLHRLDKETSGMILLVGRKFRIPFKS

SEQ ID NO: 8765 - protein, 143 aa, Helicobacter pylori
  misc_feature (B) LOCATION 1...143
  hypothetical: YES
FYWWEENSEFHLKAKKAFKDRAVKKEYLAIVQGIIEEEREINAPILTIKTTKAFSKISKKGQEAVTIITPLKIINKKTLLKVGIKTGRTHQIRVHLKHINHPIIGDTLYNNEPSSAKRLMLHAHKIALLGYEFEAIAPKEFEI

SEQ ID NO: 8766 - protein, 242 aa, Helicobacter pylori
  misc_feature (B) LOCATION 1...242
  hypothetical: YES
MEKAYKLLSVQENISHKKAKALIDSGLVSIGGQKLMVARKELPQNTRFSVQKVEKPSVIFEDENILALFKPPFIESYDLVSFFKGWALLHRLDKETSGVILLVKENSEFHLKAKKAFKDRAVKKEYLAIVQGIIEEEREINAPILTIKTTKAFSKISKKGQEAVTIITPLKIINKKTLLKVGIKTGRTHQIRVHLKHINHPIIGDTLYNNEPSSAKRLMLHAHKIALLGYEFEAIAPKEFEI

SEQ ID NO: 8767 - protein, 93 aa, Helicobacter pylori
  misc_feature (B) LOCATION 1...93
  hypothetical: YES
MQIDDALLQRLEKLSMLEIKDEHKESVKGHLAEVLGFVENIFALETNNLKTDTHLSTPLREDEPKSQPHIAKEILSQNKHSQDHYFVVPKIIE

SEQ ID NO: 8768 - protein, 96 aa, Helicobacter pylori
  misc_feature (B) LOCATION 1...96
  hypothetical: YES
RKRMQIDDALLQRLEKLSMLEIKDEHKESVKGHLAEVLGFVENIFALETNNLKTDTHLSTPLREDEPKSQPHIAKEILSQNKHSQDHYFVVPKIIE

SEQ ID NO: 8769 - protein, 58 aa, Helicobacter pylori
  misc_feature (B) LOCATION 1...58
  hypothetical: YES
VLTSGDMITCPYCGRILYAESTHESNAQPPKESQPKESQEESQEESQEESQEAVRLIV

SEQ ID NO: 8770 - protein, 267 aa, Helicobacter pylori
  misc_feature (B) LOCATION 1...267
  hypothetical: YES
MNTHLKQLIEISHLDKEIDSLEPLIREKRKDLDKALNDKEAKNKAILNLEEEKLALKLQVSKNEQTLQDTNAKIASIQKKMSEIKSERELRSLNIEEDIAKERSNQANREIENLQNEIKHKSEKQEVLKKEMLELEKLALELENLVENEVKNIKETQQIIFKKKEELVEKTEPKIYSFYERIRRWAKNTSIVTIKKQACGGCFIRLNDKIYAEVLTSGDMITCPYCGRILYAESTHESNAQPPKESQPKESQEESQEESQEESQESV

SEQ ID NO: 8771 - protein, 270 aa, Helicobacter pylori
  misc_feature (B) LOCATION 1...270
  hypothetical: YES
RKAMNTHLKQLIEISHLDKEIDSLEPLIREKRKDLDKALNDKEAKNKAILNLEEEKLALKLQVSKNEQTLQDTNAKIASIQKKMSEIKSERELRSLNIEEDIAKERSNQANREIENLQNEIKHKSEKQEVLKKEMLELEKLALELENLVENEVKNIKETQQIIFKKKEELVEKTEPKIYSFYERIRRWAKNTSIVTIKKQACGGCFIRLNDKIYAEVLTSGDMITCPYCGRILYAESTHESNAQPPKESQPKESQEESQEESQEESQESV

SEQ ID NO: 8772 - protein, 101 aa, Helicobacter pylori
  misc_feature (B) LOCATION 1...101
  hypothetical: YES
RLGILKKLRFSSFKRKVRRFCLGVAFLISGAGTLDAKTFTLQEFFKEVEINSMELIGKKADFKSRLNEQRSVNAWDFPYIFNETSMVKNFQGIVERSPEPF

SEQ ID NO: 8773 - protein, 173 aa, Helicobacter pylori
  misc_feature (B) LOCATION 1...173
  hypothetical: YES
NFYGKELPRHCRAQPRTLLMVRPKLPWVSSLLSKSLSIKTIQYDKSYQLNKNLAFIGAKRLYLTYVMTTEKYQVYTHREANFYSQLKIAKEKVKAGSMSEKDYINFNNYYLESKLAKTNVETKLIDLEKMLDTMLAIVEPVKDGAHFDTYLDHLHDVKVIGLDFEYVRLEPEL

SEQ ID NO: 8774 - protein, 431 aa, Helicobacter pylori
  misc_feature (B) LOCATION 1...431
  hypothetical: YES
LRFSSFKRKVRRFCLGVAFLISGAGTLDAKTFTLQEFFKEVEINSMELIGKKADFKSRLNEQRSVNAWDFPYIFNETSMVKNFQGIVEAQPRTLLMVRPKLPWVSSLLSKSLSIKTIQYDKSYQLNKNLAFIGAKRLYLTYVMTKEKYQVYAQREANFYSQLKIAKEKVKAGSMSEKDYINFNNSYLESKLAKTNVETKLIDLEKMLDTMLAIVEPVKDGAHFDTYLDHLHDVKVIGLDFEYVRLEPEALKFKLDRSLYVDILDLTAKDYQVNAKLANRDVFNAFEFGIGSESYNSSTNLSIKLHIPLPVTPKNIYQNLKFLDLQSGTLAQNELMKQNIRINANSYLNQLKTKKAYFETQKKPIANKNLLMEMGRIAYEAQKIGLFEYLIYQNSYMDALITLAEAKIEYIDISALLKKTLGESLTKLGLLH

SEQ ID NO: 8775 - protein, 56 aa, Helicobacter pylori
  misc_feature (B) LOCATION 1...56
  hypothetical: YES
KAISKALTEDLGEQDFANGVLSKLQQDMQNLHNQAQNKAQSIAQLDAKINALKEIQ

SEQ ID NO: 8776 - protein, 84 aa, Helicobacter pylori
  misc_feature (B) LOCATION 1...84
  hypothetical: YES
LIDEVAFKKSVDAVPNPIESEEFDYADKLPGQIRGKTGFLKGDEANAFIQSVENHVRGFEAEAKQDVKGHIQGFNRGSRRTRFC

SEQ ID NO: 8777 - protein, 131 aa, Helicobacter pylori
  misc_feature (B) LOCATION 1...131
  hypothetical: YES
LREIISDDLIDEVAFKKSVDAVLNPIEFEEFDYADKLPGQIRGKTGFLKGDEANAFIQSVENHVRGFEAEAKQDVKGHIQGLREDLGEQDFANGVLSKLQQDMQNLHNQAQNKAQSIAQLDAKINALKEIQ

SEQ ID NO: 8778 - protein, 110 aa, Helicobacter pylori
  misc_feature (B) LOCATION 1...110
  hypothetical: YES
NRIKDIRDIKGLKAANTLSSTYGEIAFKYDAQIVSVDSMAQALLLVAQKRADLTLNSSLAILNYLNTHKNSPFKIAWESKEKDGGASFVINKHQEKTLELINQAMRKNDQ

SEQ ID NO: 8779 - protein, 118 aa, Helicobacter pylori
  misc_feature (B) LOCATION 1...118
  hypothetical: YES
LKAANTLSSTYGEIAFKYDAQIVSVDSMAQALLLVAQKRADLTLNSSLAILNYLNTHKNSPFKIAWESKEKDGGASFVINKHQEKALELINQAMRRLINKGVLKRLGEQFFGKDVSQP

SEQ ID NO: 8780 - protein, 257 aa, Helicobacter pylori
  misc_feature (B) LOCATION 1...257
  hypothetical: YES
MKKISCLLLVISLFGGFLNASSLYEKLVNKETISVGTEGIYPPFTYHDKEGKLTGYDVEVARELAKELGVKIKFHETSWDIMLTGLKSGRFDMVANQVSLTTKKRQAAFDKSLPYSYSGTIMLVRKDENRIKDIRDIKGLKAANTLSSTYGEIAFKYDAQIVSVDSMAQALLLVAQKRADLTLNSSLAILNYLNTHKNSPFKIAWESKEKDGGASFVINKHQEKALELINQAMRRLINKGVLKRLGEQFFGKDVSQP

SEQ ID NO: 8781 - protein, 133 aa, Helicobacter pylori
  misc_feature (B) LOCATION 1...133
  hypothetical: YES
MNYDNYWDEDKPELNITPLVDVMLVLLAILMVTTPTLTYKEEIALPSGSKTARATQDKVIEIRMDKDAKIYIDSQTYEYNSFPDTFNLLSKKYDKDTRVSIRADKRLTYDKVIYLLKTIKEAGFLKVSLITSP

SEQ ID NO: 8782 - protein, 133 aa, Helicobacter pylori
  misc_feature (B) LOCATION 1...133
  hypothetical: YES
MNYDNYWDEDKPELNITPLVDVMLVLLAILMVTTPTLTYKEEIALPSGSKTARATQDKVIEIRMDKDAKIYIDSQTYEYXSFPDTFNLLSKKYDKDTRVSIRADKRLTYDKVIYLLKTIKEAGFLKVSLITSP

SEQ ID NO: 8783 - protein, 136 aa, Helicobacter pylori
  misc_feature (B) LOCATION 1...136
  hypothetical: YES
KVFMNYDNYWDEDKPELNITPLVDVMLVLLAILMVTTPTLTYKEEIALPSGSKTARATQDKVIEIRMDKDAKIYIDSQTYEYNSFPDTFNLLSKKYDKDTRVSIRADKRLTYDKVIYLLKTIKEAGFLKVSLITSP

SEQ ID NO: 8784 - protein, 91 aa, Helicobacter pylori
  misc_feature (B) LOCATION 1...91
  hypothetical: YES
RQDSIVYVSRENLNEFGKTVFNLNLIALNSKYIRRLTVNGSNQMPRFSMDGRNIMYIKKTSQEYAMGLILLDYNQSFLFPLKNVKIQAFDW

SEQ ID NO: 8785 - protein, 95 aa, Helicobacter pylori
  misc_feature (B) LOCATION 1...95
  hypothetical: YES
LSRNGVVSSVSSDGSKILMSLAPDGQPDVYLYDTHKKTKTKITRYPGIDVSGVFLEDDKSMAFVSDRSGYPNIYMKKLGLKERRSNSFMKEEAMN

SEQ ID NO: 8786 - protein, 215 aa, Helicobacter pylori
  misc_feature (B) LOCATION 1...215
  hypothetical: YES
GRTMKYLWLFLIYAIGLFATDKTLDIIKTIQKLPKIEVRYSIDNDANYALKLHEVLANDLKTSQHFDVSQNKEQGAINYAELKDKKVHLVALVSVAVENGNKISRLKLYDVDTGTLKKTFDYPIVSLDLYPFAAHNMAIVVNDYLKAPSIAWMKRLIVFSKYIGPGITNIALADYTMRYQKEIIKNNRLNIFPKWANAEQTEFYYTQMAEKRPWF

SEQ ID NO: 8787 - protein, 324 aa, Helicobacter pylori
  misc_feature (B) LOCATION 1...324
  hypothetical: YES
MKYLWLFLIYAIGLFATDKTLDIIKTIQKLPKIEVRYSIDNDANYALKLHEVLANDLKTSQHFDVSQNKEQGAINYAELKDKKVHLVALVSVAVENGNKISRLKLYDVDTGTLKKTFDYPIVSLDLYPFAAHNMAIVVNDYLKAPSIAWMKRLIVFSKYIGPGITNIALADYTMRYQKEIIKNNRLNIFPKWANAEQTEFYYTQYGEKTPMILKYNIQKATHENIASSQGMAVVSSVSSDGSKILMSLAPDGQPDVYLYDTHKKTKTKITRYPGIDVSGVFLEDDKSMAFVSDRSGYPNIYMKKLGLKESAEQLLYEGRSNESI

SEQ ID NO: 8788 - protein, 417 aa, Helicobacter pylori
  misc_feature (B) LOCATION 1...417
  hypothetical: YES
MKYLWLFLIYAIGLFATDKTLDIIKTIQKLPKIEVRYSIDNDANYALKLHEVLANDLKTSQHFDVSQNKEQGAINYAELKDKKVHLVALVSVAVENGNKISRLKLYDVDTGTLKKTFDYPIVSLDLYPFAAHNMAIVVNDYLKAPSIAWMKRLIVFSKYIGPGITNIALADYTMRYQKEIIKNNRLNIFPKWANAEQTEFYYTQYGEKTPMILKYNIQKATHENIASSQGMAVVSSVSSDGSKILMSLAPDGQPDVYLYDTHKKTKTKITRYPGIDVSGVFLEDDKSMAFVSDRSGYPNIYMKKLGLKESAEQLLYEGRSNESIDAYKDSIVYVSRENLNEFGKTVFNLNLIALNSKYIRRLTVNGSNQMPRFSMDGRNIMYIKKTSQEYAMGLILLDYNQSFLFPLKNVKIQAFDW

SEQ ID NO: 8789 - protein, 597 aa, Helicobacter pylori
  misc_feature (B) LOCATION 1...597
  hypothetical: YES
MSNQEYTFQTEINQLLDLMIHSLYSNKEIFLRELISNASDALDKLNYLMLTDEKLKGLNTTPSIHLSFDSQKKTLTIKDNGIGMDKSDLIEHLGTIAKSGTKSFLSALSGDKKKDSALIGQFGVGFYSAFMVASKIVVQTKKVTSHQAYAWVSDGKGKFEISECVKEEQGTEITLFLKEEDSHFASRWEIDSVVKKYSEHIPFPIFLTYTDTKFEGEGDNKKEVKEEKCDQINQASALWKMNKSELKEKDYKDFYQSFAHDNSEPLSYIHNKVEGSLEYTTLFYIPSKAPFDLFRVDYKSGVKLYVKRVFITDDDKELLPSYLRFVKGVIDSEDLPLNVSREILQQNKILANIRSASVKKILSEIERLSKDNKNYHKFYEPFGKVLKEGLYGDFENKEKLLELLRFYSKDKGEWISLKEYKENLKENQKSIYYLLGENLDLLKASPLLEKYAQKGYDVLLLSDEIDAFVMPGVNEYDKTPFRDASHSESLKELGLAEIHDEVKDQFKDLIKAFEENLKDEIKGVELSGHLTSAVALIGDEPNAMMANWMRQMGQSVPESKKTLELNPNHAILQKLLKCEDKEQLSAFIWLLYDGRSF

SEQ ID NO: 8790 - protein, 621 aa, Helicobacter pylori
  misc_feature (B) LOCATION 1...621
  hypothetical: YES
MSNQEYTFQTEINQLLDLMIHSLYSNKEIFLRELISNASDALDKLNYLMLTDEKLKGLNTTPSIHLSFDSQKKTLTIKDNGIGMDKSDLIEHLGTIAKSGTKSFLSALSGDKKKDSALIGQFGVGFYSAFMVASKIVVQTKKVTSHQAYAWVSDGKGKFEISECVKEEQGTEITLFLKEEDSHFASRWEIDSVVKKYSEHIPFPIFLTYTDTKFEGEGDNKKEVKEEKCDQINQASALWKMNKSELKEKDYKDFYQSFAHDNSEPLSYIHNKVEGSLEYTTLFYIPSKAPFDLFRVDYKSGVKLYVKRVFITDDDKELLPSYLRFVKGVIDSEDLPLNVSREILQQNKILANIRSASVKKILSEIERLSKDNKNYHKFYEPFGKVLKEGLYGDFENKEKLLELLRFYSKDKGEWISLKEYKENLKENQKSIYYLLGENLDLLKASPLLEKYAQKGYDVLLLSDEIDAFVMPGVNEYDKTPFRDASHSESLKELGLAEIHDEVKDQFKDLIKAFEENLKDEIKGVELSGHLTSAVALIGDEPNAMMANWMRQMGQSVPESKKTLELNPNHAILQKLLKCEDKEQLSAFIWLLYDGAKLLEKGALKDAKSFNERLNSVLLKAL

SEQ ID NO: 8791 - protein, 634 aa, Helicobacter pylori
  misc_feature (B) LOCATION 1...634
  hypothetical: YES
LYNLKNFIKGKSSMSNQEYTFQTEINQLLDLMIHSLYSNKEIFLRELISNASDALDKLNYLMLTDEKLKGLNTTPSIHLSFDSQKKTLTIKDNGIGMDKSDLIEHLGTIAKSGTKSFLSALSGDKKKDSALIGQFGVGFYSAFMVASKIVVQTKKVTSHQAYAWVSDGKGKFEISECVKEEQGTEITLFLKEEDSHFASRWEIDSVVKKYSEHIPFPIFLTYTDTKFEGEGDNKKEVKEEKCDQINQASALWKMNKSELKEKDYKDFYQSFAHDNSEPLSYIHNKVEGSLEYTTLFYIPSKAPFDLFRVDYKSGVKLYVKRVFITDDDKELLPSYLRFVKGVIDSEDLPLNVSREILQQNKILANIRSASVKKILSEIERLSKDNKNYHKFYEPFGKVLKEGLYGDFENKEKLLELLRFYSKDKGEWISLKEYKENLKENQKSIYYLLGENLDLLKASPLLEKYAQKGYDVLLLSDEIDAFVMPGVNEYDKTPFRDASHSESLKELGLAEIHDEVKDQFKDLIKAFEENLKDEIKGVELSGHLTSAVALIGDEPNAMMANWMRQMGQSVPESKKTLELNPNHAILQKLLKCEDKEQLSAFIWLLYDGAKLLEKGALKDAKSFNERLNSVLLKAL

SEQ ID NO: 8792 - protein, 638 aa, Helicobacter pylori
  misc_feature (B) LOCATION 1...638
  hypothetical: YES
ARLLLYNLKNFIKGKSSMSNQEYTFQTEINQLLDLMIHSLYSNKEIFLRELISNASDALDKLNYLMLTDEKLKGLNTTPSIHLSFDSQKKTLTIKDNGIGMDKSDLIEHLGTIAKSGTKSFLSALSGDKKKDSALIGQFGVGFYSAFMVASKIVVQTKKVTSHQAYAWVSDGKGKFEISECVKEEQGTEITLFLKEEDSHFASRWEIDSVVKKYSEHIPFPIFLTYTDTKFEGEGDNKKEVKEEKCDQINQASALWKMNKSELKEKDYKDFYQSFAHDNSEPLSYIHNKVEGSLEYTTLFYIPSKAPFDLFRVDYKSGVKLYVKRVFITDDDKELLPSYLRFVKGVIDSEDLPLNVSREILQQNKILANIRSASVKKILSEIERLSKDNKNYHKFYEPFGKVLKEGLYGDFENKEKLLELLRFYSKDKGEWISLKEYKENLKENQKSIYYLLGENLDLLKASPLLEKYAQKGYDVLLLSDEIDAFVMPGVNEYDKTPFRDASHSESLKELGLAEIHDEVKDQFKDLIKAFEENLKDEIKGVELSGHLTSAVALIGDEPNAMMANWMRQMGQSVPESKKTLELNPNHAILQKLLKCEDKEQLSAFIWLLYDGAKLLEKGALKDAKSFNERLNSVLLKAL

SEQ ID NO: 8793 - protein, 274 aa, Helicobacter pylori
  misc_feature (B) LOCATION 1...274
  hypothetical: YES
MLVTRFKKAFISYSLGVLVVSLLLNVCNASAQEVKVKDYFGEQTIKLPVSKIAYIGSYVEVPAMLNVWDRVVGVSDYAFKDDIVKATLKGEDLKRVKHMSTDHTAALNVELLKKLSPDLVVTFVGNPKAVEHAKKFGISFLSFQETTIAEAMQAMQAQATVLEIDASKKFAKMQETLDFIADRLKGVKKKKGVELFHKANKISGHQAINSDILQQGGIDNFGLKYVKFGRADISVEKIVKENPEIIFIRWVTPLTPDYVLNNPKFSTINAIKNI

SEQ ID NO: 8794 - protein, 302 aa, Helicobacter pylori
  misc_feature (B) LOCATION 1...302
  hypothetical: YES
LQKCLPCSILGIGSWAFRITLLNLILLKPPMLNVWDRVVGVSDYAFKDDIVKATLKGEDLKRVKHMSTDHTAALNVELLKKLSPDLVVTFVGNPKAVEHAKKFGISFLSFQETTIAEAMQAMQAQATVLEIDASKKFAKMQETLDFIAERLKGVKKKKGVELFHKANKISGHQAISSDILEKGGIDNFGLKYVKFGRADISVEKIVKENPEIIFIWWVSPLTPEDVLNNPKFSTIKAIKNKQVYKLPTMDIGGPRAPLISLFIALKAHPEAFKGVDINAIVKDYYKVVFDLNDAEIEPFLWH

SEQ ID NO: 8795 - protein, 335 aa, Helicobacter pylori
  misc_feature (B) LOCATION 1...335
  hypothetical: YES
MLVTRFKKAFISYSLGVLVVSLLLNVCNASAQEVKVKDYFGEQTIKLPVSKIAYIGSYVEVPAMLNVWDRVVGVSDYAFKDDIVKATLKGEDLKRVKHMSTDHTAALNVELLKKLSPDLVVTFVGNPKAVEHAKKFGISFLSFQETTIAEAMQAMQAQATVLEIDASKKFAKMQETLDFIAERLKGVKKKKGVELFHKANKISGHQAISSDILEKGGIDNFGLKYVKFGRADISVEKIVKENPEIIFIWWVSPLTPEDVLNNPKFSTIKAIKNKQVYKLPTMDIGGPRAPLISLFIALKAHPEAFKGVDINAIVKDYYKVVFDLNDAEIEPFLWH

SEQ ID NO: 8796 - protein, 333 aa, Helicobacter pylori
  misc_feature (B) LOCATION 1...333
  hypothetical: YES
MLIARFKKALISYSLGVLLVSSLLGVANASNQEIQVKDYFGEQTIKLPVSKIIYLGSFAEVPAMFNTWDRVVGISDYAFKSDIVKATLKDPERIKPMSSDHVAALNVELLKKLSPDLVVTFVGNPKAVEHAKKFGISFLSFQEKTIVEVMEDIDAQAKALEVDASKKLAKMQETLDFIKERLKNVKKKKGVELFHKANKISGHQALDSDILEKGGIDNFGLKYVKFGRADISVEKIVKENPEIIFIWWISPLSPEDVLNNPKFSTIKAIKNKQVYKLPTMDIGGPRAPLISLFIALKAHPEAFKGVDINAIIKDYYKVVFDLNDAEVEPFLWH

SEQ ID NO: 8797 - protein, 333 aa, Helicobacter pylori; identical to SEQ ID NO: 8796
  misc_feature (B) LOCATION 1...333
  hypothetical: YES

SEQ ID NO: 8798 - protein, 352 aa, Helicobacter pylori
  misc_feature (B) LOCATION 1...352
  hypothetical: YES
LYFLNGGYNRLHKSYERIVMLIARFKKALISYSLGVLLVSSLLGVANASNQEIQVKDYFGEQTIKLPVSKIIYLGSFAEVPAMFNTWDRVVGISDYAFKSDIVKATLKDPERIKPMSSDHVAALNVELLKKLSPDLVVTFVGNPKAVEHAKKFGISFLSFQEKTIVEVMEDIDAQAKALEVDASKKLAKMQETLDFIKERLKNVKKKKGVELFHKANKISGHQALDSDILEKGGIDNFGLKYVKFGRADISVEKIVKENPEIIFIWWISPLSPEDVLNNPKFSTIKAIKNKQVYKLPTMDIGGPRAPLISLFIALKAHPEAFKGVDINAIIKDYYKVVFDLNDAEVEPFLWH

SEQ ID NO: 8799 - protein, 357 aa, Helicobacter pylori
  misc_feature (B) LOCATION 1...357
  hypothetical: YES
FHFYCLYFLNGGYNRLHKSYERIVMLIARFKKALISYSLGVLLVSSLLGVANASNQEIQVKDYFGEQTIKLPVSKIIYLGSFAEVPAMFNTWDRVVGISDYAFKSDIVKATLKDLERIKPMSSDHVAALNVELLKKLSPNLVVTFVGNPKAVEHAKKFGISFLSFQEKTIVEVMEDIDAQAKALEVDASKKLAKMQETLDFIKERLKNVKKKKGVELFHKANKISGHQALDSDILEKGGIDNFGLKYVKFGRADISVEKIVKENPEIIFIWWVSPLTPEDVLNNPKFSTIKAIKNKQVYKLPTMDIGGPRAPLISLFIALKAHPEAFKGVDINAIIKDYYKVVFDLNDAEVEPFLWH

SEQ ID NO: 8800 - protein, 86 aa, Helicobacter pylori
  misc_feature (B) LOCATION 1...86
  hypothetical: YES
HFNIFTEDNREISGSTDKLSYNALNGEYKLLQNAVVREVGKSNVITGDEIILNKTKGYADVLGSAKRPLNLCLIWKTLMKKIVRLN

SEQ ID NO: 8801 - protein, 85 aa, Helicobacter pylori
  misc_feature (B) LOCATION 1...85
  hypothetical: YES
FNIFTEDNREISGSTDKLSYNALNGEYKLLQNAVVREVGKSNVITGDEIILNKTKGYADVLGSAKRPLNLCLIWKTLMKKIVRLN

SEQ ID NO: 8802 - protein, 105 aa, Helicobacter pylori
  misc_feature (B) LOCATION 1...105
  hypothetical: YES
NQTKPERKEKIPHFQRRVLMRWWCFLVCCLSVLSVMDAKKLENKGLKKERELLEITGNQFVANDKTKTAVIQGNVQIKKGKDRLFADKVSVFLNDKRKPERYEAA

SEQ ID NO: 8803 - protein, 185 aa, Helicobacter pylori
  misc_feature (B) LOCATION 1...185
  hypothetical: YES
MRWWCFLVCCLSVLSVMDAKKLENKGLKKERELLEITGNQFVANDKTKTAVIQGNVQIKKGKDRLFADKVSVFLNDKRKPERYEATGNTHFNIFTEDNREISGSTDKLIYNALNGEYKLLQNAVVREVGKSNVITGDEIILNKTKGYADVLGSAKRPAKFVFDMEDINEENRKAKLKKKGAKEKP

SEQ ID NO: 8804 - protein, 204 aa, Helicobacter pylori
  misc_feature (B) LOCATION 1...204
  hypothetical: YES
KCYDTLKLVKQTSKKIKRVRLKIFVLLMSVILGISLTGCIGYRMDLEHFNTLYYEESPKKAYEYSKQFTKKKKNALLWDLQNGLSALYARDYKTSLGVLDQAEQRFDKTQSAFTRGAGYVGATMINDNVRAYGGNIYEGVLINYYKAIDYMLLNDRRKLGCNSTARMNANAGLKNFIMRKCKKPLKKSILAKSTILIWNALGQK

SEQ ID NO: 8805 - protein, 333 aa, Helicobacter pylori
  misc_feature (B) LOCATION 1...333
  hypothetical: YES
AKARVQFNRANERQRRAKEFYYEEVQKAIKEIDSSKKHNINMERSRAEVSEILNNTYSNLDKYEAYQGLLNPAVSYLSGLFYALNGDKNKGLGYLNEAYGISQSPFVAQDLVFFKNPNRSHFTWIIIEDGKEPQKSEFKIDVPIFMIDSVYNVSVALPKLEKGEAFYQNFTLKDGEKVTPFDTLASIDAVVASEFRKQLPYIITRAILSATFKVGMQAVANYYLGFVGGLVTSLYSGVSTFADTRNTSIFAHKIYLMRIKNKAFESYEVRADSIDAFSFSLKPCKRSLESPKIIDARELLSGFVTAPQVFCSNRHNILYVRSFKNGFVLSHLK

SEQ ID NO: 8806 - protein, 469 aa, Helicobacter pylori
  misc_feature (B) LOCATION 1...469
  hypothetical: YES
LKIFVLLMSVILGISLTGCIGYRMDLEHFNTLYYEESPKKAYEYSKQFTKKKKNALLWDLQNGLSALYARDYKTSLGVLDQAEQRFDKTQSAFTRGAGYVGATMINDNVRAYGGNIYEGVLINYYKAIDYMLLNDSAKARVQFNRANERQRRAKEFYYEEVQKAIKEIDSSKKHNINMERSRAEVSEILNNTYSNLDKYEAYQGLLNPAVSYLSGLFYALNGDKNKGLGYLNEAYGISQSPFVAQDLVFFKNPNRSHFTWIIIEDGKEPQKSEFKIDVPIFMIDSVYNVSVALPKLEKGEAFYQNFTLKDGEKVTPFDTLASIDAVVASEFRKQLPYIITRAILSATFKVGMQAVANYYLGFVGGLVTSLYSGVSTFADTRNTSIFAHKIYLMRIKNKAFESYEVRADSIDAFSFSLKPCKRSLESPKIIDARELLSGFVTAPQVFCSNRHNILYVRSFKNGFVLSHLK

SEQ ID NO: 8807 - protein, 140 aa, Helicobacter pylori
  misc_feature (B) LOCATION 1...140
  hypothetical: YES
MLKKLLLISLFLGFLRAEGEHYEIIAELSKAFLKAKEVLTAINKTCIETGHDRTQIRLQNDFLENLSQTEQQFDDYFEKDFKSVGVLKTLLKDIQSLEKTSNKLVCVAPKNAKNFEILEGAITQIIGLEEQMNQFINGAK

SEQ ID NO: 8808 - protein, 146 aa, Helicobacter pylori
  misc_feature (B) LOCATION 1...146
  hypothetical: YES
GDKMLKKLLLISLFLGFLRAEGEHYEIIAELSKAFLKAKEVLTAINKTYKTCIETGHDRTQIRLQNDFLENLSQTEQQFDDYFEKDFKSVGVLKTLLKDIQSLEKTSNKLVCVAPKNAKNFEILEGAITQIIGLEEQMNQFINGAK

SEQ ID NO: 8809 - protein, 163 aa, Helicobacter pylori
  misc_feature (B) LOCATION 1...163
  hypothetical: YES
ALSRCLSDRFNQYPALQKTEHHFVDFLNQDKHYAIIQRADKSISSNEALARSLIGAYVLNRESINRIDDKSRYELVRLQSSSKVWQRFEDLIKAQNSIYVQSHLEREVHIVNIAIYQQDNNPIASVSIAAKLLNENKLVYEKRYKIVLSYLFDTPDFDYASMP

SEQ ID NO: 8810 - protein, 175 aa, Helicobacter pylori
  misc_feature (B) LOCATION 1...175
  hypothetical: YES
LKIAYRLLGLMSFIALVLAIVLISILPLQKTEHHFVDFLNQDKHYAIIQRADKSISSNEALARSLIGAYVLNRESINRIDDKSRYELVRLQSSSKVWQRFEDLIKAQNSIYVQSHLEREVHIVNIAIYQQDNNPIASVSIAAKLLNENKLVYEKRYKIVLSYLFDTPDFDYASMP

SEQ ID NO: 8811 - protein, 253 aa, Helicobacter pylori
  misc_feature (B) LOCATION 1...253
  hypothetical: YES
KQVKSRMKEKPFNSEQMAFLEELLSHQEKHLESKLSGFSVNDLDMQSVFRLERNRLKIAYRLLGLMSFIALVLAIVLISILPLQKTEHHFVDFLNQDKHYAIIQRADKSISSNEALARSLIGAYVLNRESINRIDDKSRYELVRLQSSSKVWQRFEDLIKAQNSIYVQSHLEREVHIVNIAIYQQDNNPIASVSIAAKLLNENKLVYEKRYKIVLSYLFDTPDFDYASMPKNPTGFKITRYSITEIAPTNRND

SEQ ID NO: 8812 - protein, 278 aa, Helicobacter pylori
  misc_feature (B) LOCATION 1...278
  hypothetical: YES
LMRKVLYALMGFLLVFSALKADDFLEEANETAPANLNHPMQDLNAIQGSFFDKNRSKMSNTLNIDYFQGQTYKIRLRYAMATLLFFSKPISDFVLGDKVGFDAKILESNDRILLIKPLQIGVDSNISVIDSEGKIFSFYVFSTTFTSSKHPNLQVFIEDKNYYTNAFIKPQKENQENMSENAPKDAQKNNKPLKEEKEETKEKEEETIIIGDNTNAMKIIKKDIQKGYKALKSSQRKWYCLWACSKKSKLSLMPKEIFNDKQFTYFKFDKRLALSKSR

SEQ ID NO: 8813 - protein, 328 aa, Helicobacter pylori
  misc_feature (B) LOCATION 1...328
  hypothetical: YES
MRKVLYALMGFLLVFSALKADDFLEEANETAPANLNHPMQDLNAIQGSFFDKNRSKMSNTLNIDYFQGQTYKIRLRYAMATLLFFSKPISDFVLGDKVGFDAKILESNDRILLIKPLQIGVDSNISVIDSEGKIFSFYVFSTTFTSSKHPNLQVFIEDKNYYTNAFIKPQKENQENMSENAPKDAQKNNKPLKEEKEETKEKEEETIIIGDNTNAMKIIKKDIQKGYKALKSSQRKWYCLWACSKKSKLSLMPKEIFNDKQFTYFKFDKRLALSKFPVIYKVVDGYDNPVNTRIVGDYIIAEDVSTKWTLRLGKDYLCIRFVKRRKGE

SEQ ID NO: 8814 - protein, 335 aa, Helicobacter pylori
  misc_feature (B) LOCATION 1...335
  hypothetical: YES
VMFHKALITFIVLWFFLNGLGAYDFKHCQAFFKKASLQKGGVALKELPKGVYLYYSKTYPKHAKVIKSDPFIGLYLLQSAPSEYVYTLRDLDKDALIRPMASIGANQATEARLLVGQKGYDRYAQISQKTQKNGVISNICYQMLGLGVGGNGFIETKFIKRFLNQQEPYYGDIGVRLEERHKRLVVAQFDPFFPKNPFLKNDEILAINDYKIHSLAEFEWVVSNLSYQSLAKVKIKRNHQIKEVTLKVNKRYGGFLLKDTFLERYGIALDERFIITKIGAHLPKGLDFLKLGDRILWVNHRSVSFNPKALREALSTPKIELLVWRQGFEFYIKVR

SEQ ID NO: 8815 - protein, 343 aa, Helicobacter pylori
  misc_feature (B) LOCATION 1...343
  hypothetical: YES
HAREFCQVVMFHKALITFIVLWFFLNGLGAYDFKHCQAFFKKASLQKGGVALKELPKGVYLYYSKTYPKHAKVIKSDPFIGLYLLQSAPSEYVYTLRDLDKDALIRPMASIGANQATEARLLVGQKGYDRYAQISQKTQKNGVISNICYQMLGLGVGGNGFIETKFIKRFLNQQEPYYGDIGVRLEERHKRLVVAQFDPFFPKNPFLKNDEILAINDYKIHSLAEFEWVVSNLSYQSLAKVKIKRNHQIKEVTLKVNKRYGGFLLKDTFLERYGIALDERFIITKIGAHLPKGLDFLKLGDRILWVNHRSVSFNPKALREALSTPKIELLVWRQGFEFYIKVR

SEQ ID NO: 8816 - protein, 416 aa, Helicobacter pylori
  misc_feature (B) LOCATION 1...416
  hypothetical: YES
MKKLVFSMLLCCKSVFAEGETPLIVNDPETHVSQATIIGKMVDSIKRYEEIISKAQAQVNQLQKVNNMINTTNSLISSSAITLANPMQVLQNAQYQIESIRYNYENLKQSIENWNAQNLLRNKYLQQQCPWLNVNALTNNKIVNLKDLNNLITKNGEQTQTARDVQNLIQSISGSGYGNMQSLAGELSGRAWGEMLCKMVNDSNYESEQALLATGNNPEEQKRRFLLRVKKKVNDNKQLKDKLDPFLKRLDVLQTEFGVTDPTANHNKQGIHYCTENKETGKCDPIKNVFRTTRLDNELEQEIQTLTLDLIKASNKDAQSQAYANFNQRIKLLTLKYLKEITNQMLFLNQTMAMQSEIMTDDYFRQNNDGFGEKENHIDKQLTQKRINERERARIYFQNPNVKFDQFGFPIFSIWD

SEQ ID NO: 8817 - protein, 421 aa, Helicobacter pylori
  misc_feature (B) LOCATION 1...421
  hypothetical: YES
MKGLTMKKLVFSMLLCCKSVFAEGETPLIVNDPETHVSQATIIGKMVDSIKRYEEIISKAQAQVNQLQKVNNMINTTNSLISSSAITLANPMQVLQNAQYQIESIRYNYENLKQSIENWNAQNLLRNKYLQQQCPWLNVNALTNNKIVNLKDLNNLITKNGEQTQTARDVQNLIQSISGSGYGNMQSLAGELSGRAWGEMLCKMVNDSNYESEQALLATGNNPEEQKRRFLLRVKKKVNDNKQLKDKLDPFLKRLDVLQTEFGVTDPTANHNKQGIHYCTENKETGKCDPIKNVFRTTRLDNELEQEIQTLTLDLIKASNKDAQSQAYANFNQRIKLLTLKYLKEITNQMLFLNQTMAMQSEIMTDDYFRQNNDGFGEKENHIDEQLTQKRINERERARIYFQNPNVKFDQFGFPIFSIWD

SEQ ID NO: 8818 - protein, 421 aa, Helicobacter pylori
  misc_feature (B) LOCATION 1...421
  hypothetical: YES
MKGLTMKKLVFSMLLCCKSVFAEGETPLIVNDPETHVSQATIIGKMVDSIKRYEEIISKAQAQVNQLQKVNNMINTTNSLISSSAITLANPMQVLQNAQYQIESIRYNYENLKQSIENWNAQNLLRNKYLQQQCPWLNVNALTNNKIVNLKDLNNLITKNGEQTQTARDVQNLIQSISGSGYGNMQSLAGELSGRAWGEMLCKMVNDSNYESEQALLATGNNPEEQKRRFLLRVKKKVNDNKQLKDKLDPFLKRLDVLQTEFGVTDPTANHNKQGIHYCTENKETGKCDPIKNVFRTTRLDNELEQEIQTLTLDLTKASNKDAQSQAYANFNQRIKLLTLKYLKEITNQMLFLNQTMAMQSEIMTDDYFRQNNDGFGEKENHIDKQLTQKRINERERARIYFQNPNVKFDQFGFPIFSIWD

SEQ ID NO: 8819 - protein, 160 aa, Helicobacter pylori
  misc_feature (B) LOCATION 1...160
  hypothetical: YES
MFGMGFFEILVVLIVAIIFLGPEKFPQAVVDIVKFFRAVKKTLNDAKDTLDKEINIEEIKKETLEYQKLFENKVESLKGVKIEELEDAKVTAENEIKSIQDLMQDYKRSLETNTIPNHLNEEVSNEEALNKEVSSDESPKEVQLTTDNNAKEHDKEKEHV

SEQ ID NO: 8820 - protein, 162 aa, Helicobacter pylori
  misc_feature (B) LOCATION 1...162
  hypothetical: YES
IIMFGMGFFEILVVLIVAIIFLGPEKFPQAVVDIVKFFRAVKKTLNDAKDTLDKEINIEEIKKETLEYQKLFENKVESLKGVKIEELEDAKVTAENEIKSIQDLMQDYKRSLETNTIPNHLNEEVSNEEALNKEVSSDESPKEVQLTTDNNAKEHDKEKEHV

SEQ ID NO: 8821 - protein, 80 aa, Helicobacter pylori
  misc_feature (B) LOCATION 1...80
  hypothetical: YES
MLRILIPLLIIVWVLWRLFLRQKPHKDDHRDNHSYTQQTPKELEDHMIVCSKCQTYVSSKDAIYSGAVAYCSETCLKDKG

SEQ ID NO: 8822 - protein, 97 aa, Helicobacter pylori
  misc_feature (B) LOCATION 1...97
  hypothetical: YES
MLYASKARLFLQIKGKFMLRILIPLLIIVWVLWRLFLRQKPHKDDHRDNHSYTQQTPKELEDHMIVCSKCQTYVSSKDAIYSGAVAYCSETCLKDKG

SEQ ID NO: 8823 - protein, 97 aa, Helicobacter pylori; identical to SEQ ID NO: 8822
  misc_feature (B) LOCATION 1...97
  hypothetical: YES

SEQ ID NO: 8824 - protein, 68 aa, Helicobacter pylori
  misc_feature (B) LOCATION 1...68
  hypothetical: YES
MCSKKIRNLILCFGFILSLCAEENITKENMTETNTTEENTPKDAPILLEEKRAQTLELKEENEVAKKI

SEQ ID NO: 8825 - protein, 289 aa, Helicobacter pylori
  misc_feature (B) LOCATION 1...289
  hypothetical: YES
LGINMCSKKIRNLILCFGFILSLCAEENITKENMTETNTTEENTPKDAPILLEEKRAQTLELKEENEVAKKIDEKSLLEEIHKKKRQLYMLKGELHEKNESILFQQMAKNKSGFFIGVILGDIGINANPYEKFELLSNIQASPLLYGLRSGYQKYFANGISALRFYGEYLGGAMKGFKSDSLASYQTASLNIDLLMDKPIDKEKRFALGIFGGVGVGWNGMYQNLKEIRGYSQPNAFGLVLNLGVSMTLNLKHRFELALKMPPLKETSQTFLYYFKSTNIYYISYNYLL

SEQ ID NO: 8826 - protein, 291 aa, Helicobacter pylori
  misc_feature (B) LOCATION 1...291
  hypothetical: YES
QALGINMCSKKIRNLILCFGFILSLCAEENITKENMTETNTTEENTPKDAPILLEEKRAQTLELKEENEVAKKIDEKSLLEEIHKKKRQLYMLKGELHEKNESILFQQMAKNKSGFFIGVILGDIGINANPYEKFELLSNIQASPLLYGLRSGYQKYFANGISALRFYGEYLGGAMKGFKSDSLASYQTASLNIDLLMDKPIDKEKRFALGIFGGVGVGWNGMYQNLKEIRGYSQPNAFGLVLNLGVSMTLNLKHRFELALKMPPLKETSQTFLYYFKSTNIYYISYNYLL

SEQ ID NO: 8827 - protein, 207 aa, Helicobacter pylori
  misc_feature (B) LOCATION 1...207
  hypothetical: YES
MLRVLSVGVVFILLGCQFFNKTTLHLKYKDYPKNSPLKTASTLTPPKIFFNAHFVPPFYQKEFKKALAQQIAYFLKDKSALTFNISGNVFFSFEESPKDLKAIKERLKKTIEPNTDPKAVMRFLNLQASLILECVPQTACPFDTLLIPTALSVPIDYANRLGDNPSLFPQEDKSYHNALIKALNKAYYSLMEGLEKRLNAIENAAWL

SEQ ID NO: 8828 - protein, 218 aa, Helicobacter pylori
  misc_feature (B) LOCATION 1...218
  hypothetical: YES
ACEIRAWAFDRMLRVLSVGVVFILLGCQFFNKTTLHLKYKDYPKNSPLKTASTLTPPKIFFNAHFVPPFYQKEFKKALAQQIAYFLKDKSALTFNISGNVFFSFEESPKDLKAIKERLKKTIEPNTDPKAVMRFLNLQASLILECVPQTACPFDTLLIPTALSVPIDYANRLGDNPSLFPQEDKSYHNALIKALNKAYYSLMEGLEKRLNAIENAAWL

SEQ ID NO: 8829 - protein, 435 aa, Helicobacter pylori
  misc_feature (B) LOCATION 1...435
  hypothetical: YES
LIFLKKSLCALLISGFFIPPLMKAASFVYDLKFMSFNFNLASPPNNPYWNSLTKMQGRLMPQIGVQLDKRQALMFGAWFIQNLHTHYSYFPYSWGVTMYYQYIGKNLRFFLGIVPRSYQIGHYPLSAFKKLFWFIDPTFRGGAFQFKPAYDPNRWWNGWFEGVVDWYGGRNWNNQPKKKNYDFDQFLYFVSSEFQFLKGYLGLGGQLVIFHNANSHSMGDNYPYGGNSYLKPGDATPQWPNGYPYFSQKDNPQGGEIGKYSNPTILDRVYYHAYLKADFKNLMPYMDNIFMTFGTQSSQTHYCVRYASECKNARFYNSFGGEFYAQAQYKGFGIFNRYYFSNKPQMHFYATYGQSLYTGLPWYRAPNFDMIGLYYLYKNKWLSVRADAFFSFVGGGDGYHLYGKGGKWFVMYQQFLTLTIDTRELIDFVKSKIPK

SEQ ID NO: 8830 - protein, 441 aa, Helicobacter pylori
  misc_feature (B) LOCATION 1...441
  hypothetical: YES
KGLYFSLIFLKKSLCALLISGFFIPPLMKAASFVYDLKFMSFNFNLASPPNNPYWNSLTKMQGRLMPQIGVQLDKRQALMFGAWFIQNLHTHYSYFPYSWGVTMYYQYIGKNLRFFLGIVPRSYQIGHYPLSAFKKLFWFIDPTFRGGAFQFKPAYDPNRWWNGWFEGVVDWYGGRNWNNQPKKKNYDFDQFLYFVSSEFQFLKGYLGLGGQLVIFHNANSHSMGDNYPYGGNSYLKPGDATPQWPNGYPYFSQKDNPQGGEIGKYSNPTILDRVYYHAYLKADFKNLMPYMDNIFMTFGTQSSQTHYCVRYASECKNARFYNSFGGEFYAQAQYKGFGIFNRYYFSNKPQMHFYATYGQSLYTGLPWYRAPNFDMIGLYYLYKNKWLSVRADAFFSFVGGGDGYHLYGKGGKWFVMYQQFLTLTIDTRELIDFVKSKIPK

SEQ ID NO: 8831 - protein, 290 aa, Helicobacter pylori
  misc_feature (B) LOCATION 1...290
  hypothetical: YES
MLENVKKSLFRVLCLGALCLGGLMAEQDPKELVGLGAKSYKEQDFTQAKKYFEKACDLKENSGCFNLGVLYYQGHGVEKNLKKAASFYSKACDLNYSNGCHLLGNLYYSGQGVSQNTNKALQYYSKACDLKYAEGCASLGGIYHDGKVVTRDFKKAVEYFTKACDLNDGDGCTILGSLYDAGRGTPKDLKKALASYDKACDLKDSPGCFNAGNMYHHGEGAAKNFKEALARYSKACELENGGGCFNLGAMQYNGEGATRNEKQAIENFKKGCKLGAKGACDILKQLKIKV

SEQ ID NO: 8832 - protein, 313 aa, Helicobacter pylori
  misc_feature (B) LOCATION 1...313
  hypothetical: YES
QRDHGVLYLLNNTIIKFLIRRYIMLENVKKSLFRVLCLGALCLGGLIAEQDPKELVNLGTKSYKEQDFTQAKKYFEKACDLKENSGCFNLGVLYYQGHGVEKNLKKAASFYSKACDLNYSNGCHLLGNLYYSGQGVSQNTNKAWQYYSKACDLKYAEGCASLGGIYHDGKVFTRDFKKAVEYFTKACDLNDGDGCTILGSLYDAGRGTPKDLKKALASYDKACDLKDSPGCFNAGNMYHHGEGAAKNFKEALARYSKACELENGGGCFNLGAMQYNGEGATRNEKQAIENFKKGCKLGAKGACDILKQLKIKV

SEQ ID NO: 8833 - protein, 185 aa, Helicobacter pylori
  misc_feature (B) LOCATION 1...185
  hypothetical: YES
MXENGRGVPKDYKKAVEYFQKAVDNDIPRGYNNLGVMYKEGKGVPKDEKKAVEYFRIATEKGYTNAYINLGIMYMEGRGVPSNYAKATECFRKAMHKGNVXAYILLGDIYYSGMINWVLSRTKIRLVHYKMAADVSSSRAYXGLSESYXYGLGVEKXXKKAEEYMQKACDFDIDKNCKKKNTSSR

SEQ ID NO: 8834 - protein, 256 aa, Helicobacter pylori
  misc_feature (B) LOCATION 1...256
  hypothetical: YES
MGYASKLALKICLVGLCLFSTLGAEHLEQKGNYIYKGEEAYNNKEYERAASFYKSAIKNGESLAYILLGIMYENGRGVPKDYKKAVEYFQKAVDNDIPRGYNNLGVMYKEGKGVPKDEKKAVEYFRIATEKGYTNAYINLGIMYMEGRGVPSNYAKATECFRKAMHKGNVEAYILLGDIYYSGNDQLGIEPDKDKAVVYYKMAADVSSSRAYEGLSESYRYGLGVEKDKKKAEEYMQKACDFDIDKNCKKKNTSSR

SEQ ID NO: 8835 - protein, 274 aa, Helicobacter pylori
  misc_feature (B) LOCATION 1...274
  hypothetical: YES
DARSFFLRLVAMALCLILINSRGVAMGYASKLALKICLVGLCLFSTLGDEHLEQKGNYIYKGEEAYNNKEYERAASFYKSAIKNGESLAYILLGIMYENGRGVPKDYKKAVEYFQKAVDNDIPRGYNNLGVMYKEGKGVPKDEKKAVEYFRIATEKGYTNAYINLGIMYMEGRGVPSNYAKATECFRKAMHKGNVEAYILLGDIYYSGNDQLGIEPDKDKAVVYYKMAADVSSSRAYEGLSEPYRYGLGVEKDKKKAEEYMQKACDFDIDKNCK

SEQ ID NO: 8836 - protein, 275 aa, Helicobacter pylori
  misc_feature (B) LOCATION 1...275
  hypothetical: YES
DARSFFLRLVAMALCLILINSRGVAMGYASKLALKICLVGLCLFSTLGDEHLEQKGNYIYKGEEAYNNKEYERAASFYKSAIKNGESLAYILLGIMYENGRGVPKDYKKAVEYFQKAVDNDIPRGYNNLGVMYKEGKGVPKDEKKAVEYFRIATEKGYTNAYINLGIMYMEGRGVPSNYAKATECFRKAMHKGNVEAYILLGDIYYSGNDQLGIEPDKDKAVVYYKMAADVSSSRAYEGLSEPYRYGLGVEKDKKKAEEYMQKACDFDIDKNCKK

SEQ ID NO: 8837 - protein, 280 aa, Helicobacter pylori
  misc_feature (B) LOCATION 1...280
  hypothetical: YES
MKLRASVLIGVAILCLILSACSNYAKKVVKQKNHVYTPVYNELIEKYSEIPLNDKLKDTPFMVQVKLPNYKDYLLDNKQVVLTFKLVHHSKKITLIGDANKILQYKNYFQANGARSDIDFYLQPTLNQKGVVMIASNYNDNPNNKEKPQTFDVLQGSQPMLGANTKNLHGYDVSGANNKQVINEVAREKAQLEKINQYYKTLLQDKEQEYTTRKNNQREILETLSNRAGYQMRQNVISSEIFKNGNLNMQAKEEEVREKLQEERENEYLRNQIRSLLSGK

SEQ ID NO: 8838 - protein, 284 aa, Helicobacter pylori
  misc_feature (B) LOCATION 1...284
  hypothetical: YES
GETTMKLRASVLIGVAILCLILSACSNYAKKVVKQKNHVYTPVYNELIEKYSEIPLNDKLKDTPFMVQVKLPNYKDYLLDNKQVVLTFKLVHHSKKITLIGDANKILQYKNYFQANGARSDIDFYLQPTLNQKGVVMIASNYNDNPNNKEKPQTFDVLQGSQPMLGANTKNLHGYDVSGANNKQVINEVAREKAQLEKINQYYKTLLQDKEQEYTTRKNNQREILETLSNRAGYQMRQNVISSEIFKNGNLNMQAKEEEVREKLQEERENEYLRNQIRSLLSGK

SEQ ID NO: 8839 - protein, 116 aa, Helicobacter pylori
  misc_feature (B) LOCATION 1...116
  hypothetical: YES
LNLHFMKGFVMSGLRTFSCVVVLCGAMVNVAVAGPKIEARGELGKFVGGAVGNFVGDKMGGFVGGAIGGYIGSEVGDRVEDYIRGVDREPQNKEPQTPREPIRDFYDYGYSFGHAW

SEQ ID NO: 8840 - protein, 323 aa, Helicobacter pylori
  misc_feature (B) LOCATION 1...323
  hypothetical: YES
VQHFNFLYKDSLFSIALFTFIIALVILLEQARAYFTRKRNKKFLQKFAQNQNAYASSENLDELLKHAKISSLMFLARAYSKADVEMSIEILKGLLNRPLKDEEKIAVLDLLAKNYFSVGYLQKTKDTVKEILRFSPRNVEALLKLLHAYELEKDYSKALETLECLEELEVPKIETIKNYLYLMHLIENKEDAAKILHVSKASLDLKKIALNHLKSHDENLFWQEIDTTERLENVIDLLWDMNIPAFILEKHALLQDIARSQGLLLDHKPCQIFELEVLRALLHSPIKASLTFEYRCKHCKQIFPFESHRCPVCYQLAFMDMVA

SEQ ID NO: 8841 - protein, 335 aa, Helicobacter pylori
  misc_feature (B) LOCATION 1...335
  hypothetical: YES
VQHFNFLYKDSLFSIALFTFIIALVILLEQARAYFTRKRNKKFLQKFAQNQNAYASSENLDELLKHAKISSLMFLARAYSKADVEMSIEILKGLLNRPLKDEEKIAVLDLLAKNYFSVGYLQKTKDTVKEILRFSPRNVEALLKLLHAYELEKDYSKALETLECLEELEVPKIETIKNYLYLMHLIENKEDAAKILHVSKASLDLKKIALNHLKSHDENLFWQEIDTTERLENVIDLLWDMNIPAFILEKHALLQDIARSQGLLLDHKPCQIFELEVLRALLHSPIKASLTFEYRCKHCKQIFPFESHRCPVCYQLAFMDMVLKISKKTHAMGVD

SEQ ID NO: 8842 - protein, 336 aa, Helicobacter pylori
  misc_feature (B) LOCATION 1...336
  hypothetical: YES
IVQHFNFLYKDSLFSIALFTFIIALVILLEQARAYFTRKRNKKFLQKFAQNQNAYASSENLDELLKHAKISSLMFLARAYSKADVEMSIEILKGLLNRPLKDEEKIAVLDLLAKNYFSVGYLQKTKDTVKEILRFSPRNVEALLKLLHAYELEKDYSKALETLECLEELEVPKIETIKNYLYLMHLIENKEDAAKILHVSKASLDLKKIALNHLKSHDENLFWQEIDTTERLENVIDLLWDMNIPAFILEKHALLQDIARSQGLLLDHKPCQIFELEVLRALLHSPIKASLTFEYRCKHCKQIFPFESHRCPVCYQLAFMDMVLKISKKTHAMGVD

SEQ ID NO: 8843 - protein, 196 aa, Helicobacter pylori
  misc_feature (B) LOCATION 1...196
  hypothetical: YES
LMRKIFSYISKVLLFIGVVYAEPDSKVEALEGRKQESSLDKKIRQELKSKELKNKELKNKDLKNKEEKKETKAKRKPRAEVHHGDAKNPTPKITPPKIKGSSKGVQNQGVQNNAPKPEEKDTTPQATEKNKETSPSSQFNSIFGNPNNATNNTLEDKVVGGISLLVNGSPITLYQIQEEQEKSKVSXAXARDRLXX

SEQ ID NO: 8844 - protein, 413 aa, Helicobacter pylori
  misc_feature (B) LOCATION 1...413
  hypothetical: YES
MRKIFSYISKVLLFIGVVYAEPDSKVEALEGRKQESSLDKKIRQELKSKELKNKELKNKDLKNKEEKKETKAKRKPRAEVHHGDAKNPTPKITPPKIKGSSKGVQNQGVQNNAPKPEEKDTTPQATEKNKETSPSSQFNSIFGNPNNATNNTLEDKVVGGISLLVNGSPITLYQIQEEQEKSKVSKAQARDRLIAERIKNQEIERLKIHVDDDKLDQEMAMMAQQQGMDLDHFKQMLMAEGHYKLYRDQLKEHLEMQELLRNILLTNVDTSSETKMREYYNKHKEQFSIPTEIETVRYTSTNQEDLERAMADPNLEVPGVSKANEKIEMKTLNPQIAQVFISHEQGSFTPVMNGGGGQFITFYIKEKRGKNEVSFSQAKQFIAQKLVEESKDKILEEHFEKLRVKSRIVMIRE

SEQ ID NO: 8845 - protein, 425 aa, Helicobacter pylori
  misc_feature (B) LOCATION 1...425
  hypothetical: YES
RGECYFEREIGLMRKIFSYISKVLLFIGVVYAEPDSKVEALEGRKQESSLDKKIRQELKSKELKNKELKNKDLKNKEEKKETKAKRKPRAEVHHGDAKNPTPKITPPKIKGSSKGVQNQGVQNNAPKPEEKDTTPQATEKNKETSPSSQFNSIFGNPNNATNNTLEDKVVGGISLLVNGSPITLYQIQEEQEKSKVSKAQARDRLIAERIKNQEIERLKIHVDDDKLNQEMAMMAQQQGMDLDHFKQMLMAEGHYKLYRDQLKEHLEMQELLRNILLTNVDTSSETKMREYYNKHKEQFSIPTEIETVRYTSTNQEDLERAMADPNLEVPGVSKANEKIEMKTLNPQIAQVFISHEQGSFTPVMNGGGGQFITFYIKEKRGKNEVSFSQAKQFIAQKLVEESKDKILEEHFEKLRVKSRIVMIRE

SEQ ID NO: 8846 - protein, 85 aa, Helicobacter pylori
  misc_feature (B) LOCATION 1...85
  hypothetical: YES
YSVYIRSNFSKVAHFASGYLQTKLSTQAKSVALAKKTTKEFIEKGMTQQELDDAKKFLLGSEPLRNETISSRLNTTYNYFIWVCL

SEQ ID NO: 8847 - protein, 84 aa, Helicobacter pylori
  misc_feature (B) LOCATION 1...84
  hypothetical: YES
SVYIRSNFSKVAHFASGYLQTKLSTQAKSVALAKKTTKEFIEKGMTQQELDDAKKFLLGSEPLRNETISSRLNTTYNYFIWVCL

SEQ ID NO: 8848 - protein, 103 aa, Helicobacter pylori
  misc_feature (B) LOCATION 1...103
  hypothetical: YES
PVGLYPLESPLIYEENHLLPMGFIHLAFRGGGSLSDKNQLGLAKLFAQVLNEGTKELGAVGFAQLLEQKAISLNVDTSAEDLQITLEFLKEYEDEAIMRLKEL

SEQ ID NO: 8849 - protein, 435 aa, Helicobacter pylori
  misc_feature (B) LOCATION 1...435
  hypothetical: YES
MKKILITLITLLLGVFMGLQASALTHQEINQAKVPVIYEENHLLPMGFIHLAFRGGGSLSDKNQLGLAKLFAQVLNEGTKELGAVGFAQLLEQKAISLNVDTSAEDLQITLEFLKEYEDEAIMRLKELLKSPNFTQNALEKVKTRMLAQLLQKESDFDYLAKLTLKQELFANTPLANAALGTKESLQKIKLDDLKQQFAKVFELNKLVVVLGGDLKVNQTLNRLNNALNFLPQGKAYEEPYFEASDKKSEKVLYKDTEQAFVYFGVPFKIKDLKQDLAKSKVMMFVLGGGFGSRLMEKIRVQEGLAYSVYIRSNFSKVAHFASGYLQTKLSTQAKSVALVKKIIKEFIEKGMTQQELDDAKKFLLGSEPLRNETISSRLNTTYNYFYLGLPLDFNQTLLNQIQKMSLKEINDFIKEHTEINDLTFAIVSNKKKDK

SEQ ID NO: 8850 - protein, 127 aa, Helicobacter pylori
  misc_feature (B) LOCATION 1...127
  hypothetical: YES
MFKKMCLSLLMISGVCVGAKDLDFKLDYRATGGKFMGKMTDSSLLSITSMNDEPVVIKNLIVNRGNSVEATKKVEPKFGDKFKKEKLFDHELKYSQQIFYRLDCKPNQLLEVKIITDKGEYYHKFSK

SEQ ID NO: 8851 - protein, 127 aa, Helicobacter pylori
  misc_feature (B) LOCATION 1...127
  hypothetical: YES
MFKKMCLSLLMISGVCVGAKDLDFKLDYRATGGKFMGKMTDSSLLSITSMNDEPVVIKNLIVNRGNSCEATKKVEPKFGDKFKKEKLFDHELKYSQQIFYRLDCKPNQLLEVKIITDKGEYYHKFSK

SEQ ID NO: 8852 - protein, 128 aa, Helicobacter pylori
  misc_feature (B) LOCATION 1...128
  hypothetical: YES
LMFKKMCLSLLMISGVCVGAKDLDFKLDYRATGGKFMGKMTDSSLLSITSMNDEPVVIKNLIVNRGNSCEATKKVEPKFGDKFKKEKLFDHELKYSQQIFYRLDCKPNQLLEVKIITDKGEYYHKFSK

SEQ ID NO: 8853 - protein, 138 aa, Helicobacter pylori
  misc_feature (B) LOCATION 1...138
  hypothetical: YES
YPTNTIIERILMFKKMCLSLLMISGVCVGAKDLDFKLDYRATGGKFMGKMTDSSLLSITSMNDEPVVIKNLIVNRGNSVEATKKVEPKFGDKFKKEKLFDHELKYSQQIFYRLDCKPNQLLEVKIITDKGEYYHKFSK

SEQ ID NO: 8854 - protein, 250 aa, Helicobacter pylori
  misc_feature (B) LOCATION 1...250
  hypothetical: YES
MLGSVKKTLFGVLCLGALCLRGLMAEPDAKELVSLGIESVKKQDFAQAKAHFEKACELKEGFGCVFLGAFYEEGKGVGKDLKKAIQFYTKGCELNDGYGCRLLGNLYYNGQGVSKDAKKASQYYSKSCELNHAEGCTVLGSLHHYGVGTPKDLRKALDLYEKACDLKDSPGCINAGYMYGVAKNFKEAIVRYSKACELKDGRGCYNLGVMQYNAQGTAKDEKQAVENFKKGCKSSVKEACDALKELKIEL

SEQ ID NO: 8855 - protein, 269 aa, Helicobacter pylori
  misc_feature (B) LOCATION 1...269
  hypothetical: YES
SSIFDYNYKGLHFSNKRYIMLGSVKKTLFGVLCLGALCLRGLMAEPDAKELVSLGIESVKKQDFAQAKAHFEKACELKEGFGCVFLGAFYEEGKGVGKDLKKAIQFYTKGCELNDGYGCRLLGNLYYNGQGVSKDAKKASQYYSKSCELNHAEGCTVLGSLHHYGVGTPKDLRKALDLYEKACDLKDSPGCINAGYMYGVAKNFKEAIVRYSKACELKDGRGCYNLGVMQYNAQGTAKDEKQAVENFKKGCKSSVKEACDALKELKIEL

SEQ ID NO: 8856 - protein, 50 aa, Helicobacter pylori
  misc_feature (B) LOCATION 1...50
  hypothetical: YES
MNTEILTIMLVVSVLMGLVGLIAFLWGVKSGQFDDEKRMLESVLYDARAT

SEQ ID NO: 8857 - protein, 63 aa, Helicobacter pylori
  misc_feature (B) LOCATION 1...63
  hypothetical: YES
MNTEILTIMLVVSVLMGLVGLIAFLWGVKSGQFDDEKRMLESVLYDSASDLNEAILQEKRQKN

SEQ ID NO: 8858 - protein, 74 aa, Helicobacter pylori
  misc_feature (B) LOCATION 1...74
  hypothetical: YES
QHYPNNLKDIEMNTEILTIMLVVSVLMGLVGLIAFLWGVKSGQFDDEKRMLESVLYDSASDLNEAILQEKRQKN

SEQ ID NO: 8859 - protein, 283 aa, Helicobacter pylori
  misc_feature (B) LOCATION 1...283
  hypothetical: YES
MFEDFYRTTLSFLRSLLLLLGLLLPFSLCIADEYISISDDWDERARNQWDETARNHKTYYFENGLDHFNQGQYKQAFKDFKLAQEYSIGLGNVYLAKMYLEGKGVKVDYKKAQFYAQNAIKGYGSGLLGGALILGRMQAEGLGMKKDLKQALKTYRHVVRMFSNKSANFANKFGSNLAEFTSMLIGSRFIDLSGLSANPIKFGNKFGILVKKALQIKDNTLSWEDIAEISSNIILLKQQMGEILYRIGIAYKEGLGTRKKKDRAKKFLQKSAEFGYEKAMEAL

SEQ ID NO: 8860 - protein, 293 aa, Helicobacter pylori
  misc_feature (B) LOCATION 1...293
  hypothetical: YES
RMAQIVKGSDMFEDFYRTTLSFLRSLLLLLGLLLPFSLCIADEYISISDDWDERARNQWDETARNHKTYYFENGLDHFNQGQYKQAFKDFKLAQEYSIGLGNVYLAKMYLEGKGVKVDYKKAQFYAQNAIKGYGSGLLGGALILGRMQAEGLGMKKDLKQALKTYRHVVRMFSNKSANFANKFGSNLAEFTSMLIGSRFIDLSGLSANPIKFGNKFGILVKKALQIKDNTLSWEDIAEISSNIILLKQQMGEILYRIGIAYKEGLGTRKKKDRAKKFLQKSAEFGYEKAMEAL

SEQ ID NO: 8861 - protein, 237 aa, Helicobacter pylori
  misc_feature (B) LOCATION 1...237
  hypothetical: YES
MKTLVKNTIYSFLLLSVLMAEDITSGLKQLDNTYQETNQQVLKNLDEIFSTTSPSANNKIGQEDALNIKKAAIALRGDLALLKANFEANELFFISEDVIFKTYMSSPELLLTYMKINPLDQKTAEQQCGISDKVLVLYCEGKLKIEQEKQNIRERLETSLKAYQSNIGGTASLITASQTLVESLKNKNFIKGIKKLMLAHNKVFLNYLEELDALERSLEQSKRQYLQERQSSKIIVK

SEQ ID NO: 8862 - protein, 237 aa, Helicobacter pylori; identical to SEQ ID NO: 8861
  misc_feature (B) LOCATION 1...237
  hypothetical: YES

SEQ ID NO: 8863 - protein, 241 aa, Helicobacter pylori
  misc_feature (B) LOCATION 1...241
  hypothetical: YES
SYCQMKTLVKNTIYSFLLLSVLMAEDITSGLKQLDNTYQETNQQVLKNLDEIFSTTSPSANNKIGQEDALNIKKAAIALRGDLALLKANFEANELFFISEDVIFKTYMSSPELLLTYMKINPLDQKTAEQQCGISDKVLVLYCEGKLKIEQEKQNIRERLETSLKAYQSNIGGTASLITASQTLVESLKNKNFIKGIKKLMLAHNKVFLNYLEELDALERSLEQSKRQYLQERQSSKIIVK

SEQ ID NO: 8864 - protein, 376 aa, Helicobacter pylori
  misc_feature (B) LOCATION 1...376
  hypothetical: YES
MLAKIVFSSLVAFGVLSANVEQFGSFFNEIKKEQEEVAAKEDALKARKKLLNNTHDFLEDLVFRKQKIKELVDYRAKVLLDLENKYKKEKEALEKETRGKILTAKSKAYGDLEQALKDNPLYKKLLPNPYAYVLNQETFTQEDKERLSYYYPQVKTSSIFKKTTATTKDKAQALLQMGVFSLDEEQNKKASRLALSYKQAIEEYSNNISNLLSRKELDNIDYYLQLERNKFDSKAKDIAQKATNTLIFNSERLAFSMAIDKINEKYLRGYEAFSNLLKNVKDDVELNTLTKNFTNQKLSFAQKQKLCLLVLDSFNFDTQSKKSILKKTNEYNIFVDSDPMMSDKTTMQKEHYKIFNFFKTVVSAYRNNVAKNNPFE

SEQ ID NO: 8865 - protein, 376 aa, Helicobacter pylori; identical to SEQ ID NO: 8864
  misc_feature (B) LOCATION 1...376
  hypothetical: YES

SEQ ID NO: 8866 - protein, 382 aa, Helicobacter pylori
  misc_feature (B) LOCATION 1...382
  hypothetical: YES
GYKNYKMLAKIVFSSLVAFGVLSANVEQFGSFFNEIKKEQEEVAAKEDALKARKKLLNNTHDFLEDLVFRKQKIKELVDYRAKVLLDLENKYKKEKEALEKETRGKILTAKSKAYGDLEQALKDNPLYKKLLPNPYAYVLNQETFTQEDKERLSYYYPQVKTSSIFKKTTATTKDKAQALLQMGVFSLDEEQNKKASRLALSYKQAIEEYSNNISNLLSRKELDNIDYYLQLERNKFDSKAKDIAQKATNTLIFNSERLAFSMAIDKINEKYLRGYEAFSNLLKNVKDDVELNTLTKNFTNQKLSFAQKQKLCLLVLDSFNFDTQSKKSILKKTNEYNIFVDSDPMMSDKTTMQKEHYKIFNFFKTVVSAYRNNVAKNNPFE

SEQ ID NO: 8867 - protein, 168 aa, Helicobacter pylori
  misc_feature (B) LOCATION 1...168
  hypothetical: YES
GLKKILPALLMGFVGLNASDRLLEIMRLYQKQGLEVVGQKLDSYLADKSFWAEELQNKDTDFGYYQNKQFLFVADKSKPSLEFYEIENNMLKKINSSKALVGSKKGDKTLEGDLATPIGVYRITQKLERLDQYYGVLAFVTNYPNLYDTLKKRTGAWHLGAWNAFKWR

SEQ ID NO: 8868 - protein, 181 aa, Helicobacter pylori
  misc_feature (B) LOCATION 1...181
  hypothetical: YES
KNAPGHGIWVHGMPLNGDRNELNTKGCIAIENPILSSYDKVLKGEKAFLITYEDKFSPSTKEELSMILSSLFQWKEAWARGDFERYMRFYNPNFTRYDGMSFNAFKEYKKRVFAKNEKKNIAFSSINVIPYPNSQNKRLFYVVFDQDYKAYQQNKLSYSSNSQKELYVEIENNQASIIMEK

SEQ ID NO: 8869 - protein, 330 aa, Helicobacter pylori
  misc_feature (B) LOCATION 1...330
  hypothetical: YES
LKKILPALLMGFVGLNASDRLLEIMRLYQKQGLEVVGQKLDSYLADKSFWAEELQNKDTDFGYYQNKQFLFVADKSKPSLEFYEIENNMLKKINSSKALVGSKKGDKTLEGDLATPIGVYRITQKLERLDQYYGVLAFVTNYPNLYDTLKKRTGHGIWVHGMPLNGDRNELNTKGCIAIENPILSSYDKVLKGEKAFLITYEDKFSPSTKEELSMILSSLFQWKEAWARGDFERYMRFYNPNFTRYDGMSFNAFKEYKKRVFAKNEKKNIAFSSINVIPYPNSQNKRLFYVVFDQDYKAYQQNKLSYSSNSQKELYVEIENNQASIIMEK

SEQ ID NO: 8870 - protein, 481 aa, Helicobacter pylori
  misc_feature (B) LOCATION 1...481
  hypothetical: YES
MFRKLATSVSLISLLISNALYAKEISEADKVIKATKETKETKKEAKRLKKEAKQRQQIPDNKKPQYVSVDDTKTQALFDIYDTLNVNDKSFGDWFGNSALKNKTYLYAMDLLDYNNYLSIENPIIKTRAMGTYADLIIITGSLEQVNGYYNILKALNKRNAKFVLKINDKIPYAQATFLRVPKRSDPNAHTLDKGASIDESKLFEQQKKMYFNYANDVICRPNDEVCSPLRDEMVAMPTNDSVTQKPNIIAPYSLYRLKETNNANEAQPSPYATQTAPENSKEKLIEELIANSQLIANEEEREKKLLAEKEKQETELAKYKLKDLENQKKLKALEAELKKKNTKKPRVVEVPIPPKTSDSDETMRVIKEKENYNGLLVDKETTIKRSYKGTLISENSYSKKTPINLEDLRSLEEEIKSYYVKSNGLCYANGINLYVKIKNDPYKEGMLCGYESVQKLLSPLRDKLKYDKQKLQKALLKDLK

SEQ ID NO: 8871 - protein, 486 aa, Helicobacter pylori
  misc_feature (B) LOCATION 1...486
  hypothetical: YES
KKRKPMFRKLATSVSLISLLISNALYAKEISEADKVIKATKETKETKKEAKRLKKEAKQRQQIPDNKKPQYVSVDDTKTQALFDIYDTLNVNDKSFGDWFGNSALKNKTYLYAMDLLDYNNYLSIENPIIKTRAMGTYADLIIITGSLEQVNGYYNILKALNKRNAKFVLKINDKIPYAQATFLRVPKRSDPNAHTLDKGASIDESKLFEQQKKMYFNYANDVICRPNDEVCSPLRDEMVAMPTNDSVTQKPNIIAPYSLYRLKETNNANEAQPSPYATQTAPENSKEKLIEELIANSQLIANEEEREKKLLAEKEKQETELAKYKLKDLENQKKLKALEAELKKKNTKKPRVVEVPIPPKTSDSDETMRVIKEKENYNGLLVDKETTIKRSYKGTLISENSYSKKTPINLEDLRSLEEEIKSYYVKSNGLCYANGINLYVKIKNDPYKEGMLCGYESVQKLLSPLRDKLKYDKQKLQKALLKDLK

SEQ ID NO: 8872 - protein, 59 aa, Helicobacter pylori
  misc_feature (B) LOCATION 1...59
  hypothetical: YES
LLSRSMPKIHAVFKAFIPIPFALFAIHFVVLGIGSVFNLNRIKDKKFILRAKISHIAQA

SEQ ID NO: 8873 - protein, 81 aa, Helicobacter pylori
  misc_feature (B) LOCATION 1...81
  hypothetical: YES
DFHDFCANIHHRIRWRHRHIASLLSRSMPKIHAVFKAFIPIPFALFAIHFVVLGIGSVFNLNRIKDKKFILRAKISHIAQA

SEQ ID NO: 8874 - protein, 99 aa, Helicobacter pylori
  misc_feature (B) LOCATION 1...99
  hypothetical: YES
MKKIGLSLCLVLSLGFLKAHEVSAEEIADIFYKLNAKEPKMKINHTKGFCAKGVFLPNPQAREDLEVPLLNEKEIPASVRYSLGGVVDWTIKARLGEWR

SEQ ID NO: 8875 - protein, 141 aa, Helicobacter pylori
  misc_feature (B) LOCATION 1...141
  hypothetical: YES
SKNQKALRRSPLLQEFAAYMKTIGISSSVANTPYYSVHAFKFKDKKEKLLPARWKFVPKEGVKYLNPQELKQKDSNYLLSSFQQHLKNKPIEYQMYLVFANQNDATNDTTALWICEHKELLVGNLKVEKYERTGAIRRFSR

SEQ ID NO: 8876 - protein, 144 aa, Helicobacter pylori
  misc_feature (B) LOCATION 1...144
  hypothetical: YES
GAKMKKIGLSLCLVLSLGFLKAHEVSAEEIADIFYKLNAKEPKMKINHTKGFCAKGVFLPNPQAREDLEVPLLNEKEIPASVRYSLGGVAMDDKSKVRGMALKLENQNASWTMVMLNTEINFAKNPEEFAQFFEMRLPKNGQGR

SEQ ID NO: 8877 - protein, 262 aa, Helicobacter pylori
  misc_feature (B) LOCATION 1...262
  hypothetical: YES
MKKIGLSLCLVLSLGFLKAHEVSAEEIADIFYKLNAKEPKMKINHTKGFCAKGVFLPNPQAREDLEVPLLNEKEIPASVRYSLGGVAMDDKSKVRGMALKLENQNASWTMVMLNTEINFAKNPEEFAQFFEMRLPKNGKVDEARIKKLYEEVPSYRNFAAYMKTIGISSSVANTPYYSVHAFKFKDKKEKLLPARWKFVPKEGVKYLNPQELKQKDSNYLLSSFQQHLKNKPIEYQMYLVFANQNDATNDTTALWKGSIRNY

SEQ ID NO: 8878 - protein, 114 aa, Helicobacter pylori
  misc_feature (B) LOCATION 1...114
  hypothetical: YES
MKRPISKLKQNFLQFKHSFNKHLDKYSLYYRLFNISSIVIGFLIALFSYGAGVILVYPILFLFALIIKPSFFYYTTYLLLLVSLSIISKYYLLSHANFTMKLIMLMTQWQNWFL

SEQ ID NO: 8879 - protein, 114 aa, Helicobacter pylori; identical to SEQ ID NO: 8878
  misc_feature (B) LOCATION 1...114
  hypothetical: YES

SEQ ID NO: 8880 - protein, 121 aa, Helicobacter pylori
  misc_feature (B) LOCATION 1...121
  hypothetical: YES
TSSFKTKMKRPISKLKQNFLQFKHSFNKHLDKYSLYYRLFNISSIVIGFLIALFSYGAGVILVYPILFLFALIIKPSFFYYTTYLLLLVSLSIISKYYLLSHANFTMKLIMLMTQWQNWFL

SEQ ID NO: 8881 - protein, 115 aa, Helicobacter pylori
  misc_feature (B) LOCATION 1...115
  hypothetical: YES
RLRKACVLKHPESCYNLGIIYDRKIKGNAAQAVTYYQKSCNFDMAKGCYILGTAYEKSFLKFKQSNHKAVIYYLKACRLNEGQACRALGSLFENGDAGLDEDFEVAFDYLQKACA

SEQ ID NO: 8882 - protein, 127 aa, Helicobacter pylori
  misc_feature (B) LOCATION 1...127
  hypothetical: YES
MNIKILKILVGGLFFLSLNAHLWGKQDNSFLGIGERAYKSGNYSKAASYFKKACNDGVSEGCTQLGIIYENGQGTRIDYKKALEYYKTACQADDREGCFGLGGLYDEGLGTAQNYQEAXDAYARHAF

SEQ ID NO: 8883 - protein, 127 aa, Helicobacter pylori
  misc_feature (B) LOCATION 1...127
  hypothetical: YES
LFAKSLRLNNSGGCASLGSMYMLGRYVKKDPQKAFNYFKQACDMGSAVSCSRMGFMYSQGDTVSKDLRKALDNYERGCDMGDEVGCFALAGMYYNMKDKENAIMIYDKGCKLGMKQACENLTKLRGY

SEQ ID NO: 8884 - protein, 131 aa, Helicobacter pylori
  misc_feature (B) LOCATION 1...131
  hypothetical: YES
KKVKMNIKILKILVGGLFFLSLNAHLWGKQDNSFLGIGERAYKSGNYSKAASYFKKACNDGVSEGCTQLGIIYENGQGTRIDYKKALEYYKTACQADDREGCFGLGGLYDEGLGTAQNYQEAIDAYARHAF

SEQ ID NO: 8885 - protein, 355 aa, Helicobacter pylori
  misc_feature (B) LOCATION 1...355
  hypothetical: YES
MNIKILKILVGGLFFLSLNAHLWGKQDNSFLGIGERAYKSGNYSKAASYFKKACNDGVSEGCTQLGIIYENGQGTRIDYKKALEYYKTACQADDREGCFGLGGLYDEGLGTAQNYQEAIDAYAKACVLKHPESCYNLGIIYDRKIKGNAAQAVTYYQKSCNFDMAKGCYILGTAYEKGFLEVKQSNHKAVIYYLKACRLNEGQACRALGSLFENGDAGLDEDFEVAFDYLQKACALNNSGGCASLGSMYMLGRYVKKDPQKAFNYFKQACDMGSAVSCSRMGFMYSQGDTVSKDLRKALDNYERGCDMGDEVGCFALAGMYYNMKDKENAIMIYDKGCKLGMKQACENLTKLRGY

SEQ ID NO: 8886 - protein, 123 aa, Helicobacter pylori
  misc_feature (B) LOCATION 1...123
  hypothetical: YES
MRLLIALVLFLWWLNLGAKEADFISDWEYGLALYKNPRGVACAKCHGIKGEQQEITFYYEKGEKKILYAPKINHLDFKTFKDALSLGKGMMPKYNLNLEEIQAIYLYITSLGHKDERKDPSKP

SEQ ID NO: 8887 - protein, 148 aa, Helicobacter pylori
  misc_feature (B) LOCATION 1...148
  hypothetical: YES
FGSRAFRRIFTKWGERDFRKGAVVLMRLLIALVLFLWWLNLGAKEADFISDWEYGLALYKNPRGVACAKCHGIKGEQQEITFYYEKGEKKILYAPKINHLDFKTFKDALSLGFCMMPTYNLNLEEIQAIYLYITSLGHKDERKDPSKP

SEQ ID NO: 8888 - protein, 46 aa, Helicobacter pylori
  misc_feature (B) LOCATION 1...46
  hypothetical: YES
SNSAKKAALIQEEMAKARARGASVEDKISILEKIYSTQYDITSKRA

SEQ ID NO: 8889 - protein, 165 aa, Helicobacter pylori
  misc_feature (B) LOCATION 1...165
  hypothetical: YES
MQDNLVSVIEKQTNKKVRMLEIKPLKSSQDLKMVVIEDPDTKYNIPLVVSKDGNSVIGLSNIFFSNKSDDVKLVAETNQKIQALNATQQNSAKLNAIFNEIPADYAIELPSTNAENKDKILYIVSDPMCPHCQKELTKLRDHLKENTVRMVVVGWLEAIRLKKRL

SEQ ID NO: 8890 - protein, 164 aa, Helicobacter pylori
  misc_feature (B) LOCATION 1...164
  hypothetical: YES
QDNLVSVIEKQTNKKVRMLEIKPLKSSQDLKMVVIEDPDTKYNIPLVVSKDGNSVIGLSNIFFSNKSDDVKLVAETNQKIQALNATQQNSAKLNAIFNEIPADYAIELPSTNAENKDKILYIVSDPMCPHCQKELTKLRDHLKENTVRMVVVGWLEAIRLKKRL

SEQ ID NO: 8891 - protein, 265 aa, Helicobacter pylori
  misc_feature (B) LOCATION 1...265
  hypothetical: YES
MILRASVLSALLLVGLGAAPKHSVSASDKRMQDNLVSVIEKQTNKKVRILEIKPLKSSQDLKMVVIEDPDTKYNIPLVVSKDGNSVIGLSNIFFSNKSDDVKLVAETNQKIQALNATQQNSAKLNAIFNEIPADYAIELPSTNAENKDKILYIVSDPMCPHCQKELTKLRDHLKENTVRMVVVGWLGVNSAKKAALIQEEMAKARARGASVEDKISILEKIYSTQYDINAQKEPEDLRTKVENTTKKIFESGVIKGVPFLYHYKA

SEQ ID NO: 8892 - protein, 115 aa, Helicobacter pylori
  misc_feature (B) LOCATION 1...115
  hypothetical: YES
RSGNTTLPYKRSSSLTARALVLSSDPVEFKEASGKYWLSVNQNAYLKISSNNPLWQPKIIFYDENLKIIQIIAKENRQQEIALNLLDGVRFIHITDAKNPIILKNGISVVFDAMP

SEQ ID NO: 8893 - protein, 189 aa, Helicobacter pylori
  misc_feature (B) LOCATION 1...189
  hypothetical: YES
GPIQSAPAMNKLFLAFIVGGMLLSADALNDKIENLMGERSYHMNKLFLERLFKNRKDFYEMGRLDSLKLLNTLKENGLLSFNFDKPSVLKITFKASSNPLAFAKSINNSLNMMGYSYVLPIRMQSSSGENVFSYELKTEYVLDPNILIETMKRHGFDFMDIRRVSLKEWEYDFALQKIKLPNGESLSFE

SEQ ID NO: 8894 - protein, 273 aa, Helicobacter pylori
  misc_feature (B) LOCATION 1...273
  hypothetical: YES
MNKLFLAFIVGGMLLSADALNDKIENLMGERSYHMNKLFLERLFKNRKDFYEMGRLDSLKLLNTLKENGLLSFNFDKPSVLKITFKASSNPLAFAKSINNSLNMMGYSYVLPIRMQSSSGENVFSYELKTEYVLDPNILIETMKRHGFDFMDIRRVSLKEWEYDFALQKIKLPNARALVLSSDPVEFKEASGKYWLSVNQNAYLKISSNNPLWQPKIIFYDENLKIIQIIAKENRQQEIALNLLDGVRFIHITDAKNPIILKNGISVVFDAMP

SEQ ID NO: 8895 - protein, 273 aa, Helicobacter pylori; identical to SEQ ID NO: 8894
  misc_feature (B) LOCATION 1...273
  hypothetical: YES

SEQ ID NO: 8896 - protein, 99 aa, Helicobacter pylori
  misc_feature (B) LOCATION 1...99
  hypothetical: YES
VMLMAIFTPYILILKMMKKSMSLFANMGLEQIFCNRDIKDLNDFVFGIEVGLDSNARKNRSRKAMENHLIGLFVQAQLNFKEQVDIREFEDLRQAFGND

SEQ ID NO: 8897 - protein, 118 aa, Helicobacter pylori
  misc_feature (B) LOCATION 1...118
  hypothetical: YES
VMLMAIFTPYILILKMMKKSMSLFANMGLEQIFCNRDIKDLNDFVFGIEVGLDSNARKNRSRKAMENHLIGLFVQAQLNFKEQVDIREFEDLRQAFGNDTKKFDFVIFSKEKTYFHRS

SEQ ID NO: 8898 - protein, 119 aa, Helicobacter pylori
  misc_feature (B) LOCATION 1...119
  hypothetical: YES
CVMLMAIFTPYILILKMMKKSMSLFANMGLEQIFCNRDIKDLNDFVFGIEVGLDSNARKNRSRKAMENHLIGLFVQAQLNFKEQVDIREFEDLRQAFGNDTKKFDFVIFSKEKTYFHRS

SEQ ID NO: 8899 - protein, 115 aa, Helicobacter pylori
  misc_feature (B) LOCATION 1...115
  hypothetical: YES
MRIIIRLLSFKMNAFLKLALASLMGGLWYAFNGEGSEIVAIGIFVLILFVFFIRPVSFQDPEKREEYIERLKKNHERKMILQDKQKEEQMRLYQAKKERESRQKQDLKEQMKKYS

SEQ ID NO: 8900 - protein, 116 aa, Helicobacter pylori
  misc_feature (B) LOCATION 1...116
  hypothetical: YES
LMRIIIRLLSFKMNAFLKLALASLMGGLWYAFNGEGSEIVAIGIFVLILFVFFIRPVSFQDPEKREEYIERLKKNHERKMILQDKQKEEQMRLYQAKKERESRQKQDLKEQMKKYS

SEQ ID NO: 8901 - protein, 117 aa, Helicobacter pylori
  misc_feature (B) LOCATION 1...117
  hypothetical: YES
GLMRIIIRLLSFKMNAFLKLALASLMGGLWYAFNGEGSEIVAIGIFVLILFVFFIRPVSFQDPEKREEYIERLKKNHERKMILQDKQKEEQMRLYQAKKERESRQKQDLKEQMKKYS

SEQ ID NO: 8902 - protein, 220 aa, Helicobacter pylori
  misc_feature (B) LOCATION 1...220
  hypothetical: YES
VGNAGVALAGLMSDEIYLCALDCAYIKGFKKHAQNSYYGDEKEIDTSSLISVEGNVEGYETFSDSLFLLSKERIEEALHYYQPKKVYNLSYGAKIKHAVSLNHSQVKLKQINKQDAIVRIKSMFSPRSNHAKDLKNLQKNLIRFKEDFFTHLNTPCKTKQEAFEWVDSLSGFCQTASAKTPTIGILFEGSVAHILQSVLIVSLHLKENELTLLSNSLKTP

SEQ ID NO: 8903 - protein, 239 aa, Helicobacter pylori
  misc_feature (B) LOCATION 1...239
  hypothetical: YES
MIYGVLDGLFLAILQAQNYRFHSLYLFEENLDLFKISCYFARYEDLIKKGAKLFIQGFFNPNELKMDFLKRPITHSFLKLEIMPYKSAFNLRMRENIQSYYKQALRGWGSFEDELLGLKNTLKNLPLYQTLKTKPKKINAPICVVGNGPSLDLLLDFLKENEEKFIIFSCGTALKPLKAHGVKVDFQIEVERIDYLKEVLERAPLEDTPLMGANMLNPNAFDLAKEALMFMRGGSACAV

SEQ ID NO: 8904 - protein, 242 aa, Helicobacter pylori
  misc_feature (B) LOCATION 1...242
  hypothetical: YES
CLCVGGALAHISPLSIEYAAPFVGNAGVALAGLMSDEIYLCALDCAYIKGFKKHAQNSYYGDEKEIDTSSLISVEGNVEGYETFSDSLFLLSKERIEEALHYYQPKKVYNLSYGAKIKHAVSLNHSQVKLKQINKQDAIVRIKSMFSPRSNHAKDLKNLQKNLIRFKEDFFTHLNTPCKTKQEAFEWVDSLSGFCQTASAKTPTIGILFEGSVAHILQSVLIVSLHLKENELTLLSNSLKTP

SEQ ID NO: 8905 - protein, 405 aa, Helicobacter pylori
  misc_feature (B) LOCATION 1...405
  hypothetical: YES
MPFLKALASFDAPFLEKEISKRFRDNLVFFKSYHPNLFNALNTPFKNYQLLFETNHLNLLHTPTNALSYPKHQMIETAFNMAKNPLNNPRWSLDNNHLSLHYLKSQNNHKLPLTLKATHAISNFLDNHQTPCSLKKFLPPTMIYGVLDGLFLAILQAQNYRFHSLYLFEENLDLFKISCYFARYEDLIKKGAKLFIQGFFNPNELKMDFLKRPITHSFLKLEIMPYKSAFNLRMRENIQSYYKQALRGWGSFEDELLGVKNTLKNLPLCQTLKTKPKKINAPICVVGNGPSLDLLLDFLKENEEKFIIFSCGTALKPLKAHGVKVDFQIEVERIDYLKEVLERAPLEDTPLMGANMLNPNAFDLAKEALMFMRGGSACAYKPFEYRIRSAFCGQCRGGFSGFDER

SEQ ID NO: 8906 - protein, 631 aa, Helicobacter pylori
  misc_feature (B) LOCATION 1...631
  hypothetical: YES
MPFLKALASFDAPFLEKEISKRFRDNLVFFKSYHPNLFNALNTPFKNYQLLFETNHLNLLHTPTNALSYPKHQMIETAFNMAKNPLNNPRWSLDNNHLSLHYLKSQNNHKLPLTLKATHAISNFLDNHQTPCSLKKFLPPTMIYGVLDGLFLAILQAQNYRFHSLYLFEENLDLFKISCYFARYEDLIKKGAKLFIQGFFNPNELKMDFLKRPITHSFLKLEIMPYKSAFNLRMRENIQSYYKQALRGWGSFEDELLGLKNTLKNLPLYQTLKTKPKKINAPICVVGNGPSLDLLLDFLKENEEKFIIFSCGTALKPLKAHGVKVDFQIEVERIDYLKEVLERAPLEDTPLMGANMLNPNAFDLAKEALMFMRGGSACAYISPLSIEYAAPFVGNAGVALAGLMSDEIYLCALDCAYIKGFKKHAQNSYYGDEKEIDTSSLISVEGNVEGYETFSDSLFLLSKERIEEALHYYQPKKVYNLSYGAKIKHAVSLNHSQVKLKQINKQDAIVRIKSMFSPRSNHAKDLKNLQKNLIRFKEDFFTHLNTPCKTKQEAFEWVDSLSGFCQTASAKTPTIGILFEGSVAHILQSVLIVSLHLKENELTRFIKFSQNALKQFLKKACLLLQMQLKQP

SEQ ID NO: 8907 - protein, 83 aa, Helicobacter pylori
  misc_feature (B) LOCATION 1...83
  hypothetical: YES
MNYDVLMGFLALILLILWYAYGLRQYLKLKDKNKRLKEKLQRCNCNIKIPSILEMAHKPIIMDIKGELLPHLTESYRKSKFKE

SEQ ID NO: 8908 - protein, 87 aa, Helicobacter pylori
  misc_feature (B) LOCATION 1...87
  hypothetical: YES
GVKAMNYDVLMGFLALILLILWYAYGLRQYLKLKDKNKRLKEKLQRCNCNIKIPSILEMAHKPIIMDIKGELLPHLTESYRKSKFKE

SEQ ID NO: 8909 - protein, 258 aa, Helicobacter pylori
  misc_feature (B) LOCATION 1...258
  hypothetical: YES
LLKNIDEKKLSVSKVNEKRHMDFKKCPNFEKKCAFLCFSNLVLLIEIHSKGLHMQKKKPKNPQPNLFSILDKGDVATNNPVEESDKANKIQEPLPYVVKTQINKASMISRDPIEWAKYLSFEKRVYKDNSKEDVNFFANGEIKESSRVYEANKEGFERRITKRYDLIDRNIDRNREFFIKEIEILTHTNSLKELKEQGLEIQLTHHNETHKKALENGNEIVKEYDHLKDIYQEVERTKDGGLVREIIPSISSAEYFTL

SEQ ID NO: 8910 - protein, 432 aa, Helicobacter pylori
  misc_feature (B) LOCATION 1...432
  hypothetical: YES
MQKKKPKNPQPNLFSILDKGDVATNNPVEESDKANKIQEPLPYVVKTQINKASMISRDPIEWAKYLSFEKRVYKDNSKEDVNFFANGEIKESSRVYEANKEGFERRITKRYDLIDRNIDRNREFFIKEIEILTHTNSLKELKEQGLEIQLTHHNETHKKALENGNEIVKEYDHLKDIYQEVERTKDGGLVREIIPSISSAEYFKLYNKLPFESINNENTKLNTNDNEEVKKLEFELAKEVHILILEQQLLSATNYYSWIDKDDNANFAWKMHRLINENKLKENHLSANNANKIKQFFFNNGSILGWTKEEQSAIQENRDYSLRSALLSLEEIAQAKIELQKYYESVYVNGDGNKREIKPFKEILRDTNNFEKAYKERYDKLVSLSAAIIQAKEGGNERQNSSANNNNPIKNTIETNTSNNIIQNNDNIIIQI

SEQ ID NO: 8911 - protein, 442 aa, Helicobacter pylori
  misc_feature (B) LOCATION 1...442
  hypothetical: YES
KEQQMAYKPNKKKLKELREQPNLFSILDKGDVATNNPVEESDKANKIQEPLPYVVKTQINKASMISRDPIEWAKYLSFEKRVYKDNSKEDVNFFANGEIKESSRVYEANKEGFERRITKRYDLIDRNIDRNREFFIKEIEILTHTNSLKELKEQGLEIQLTHHNETHKKALENGNEIVKEYDHLKDIYQEVERTKDGGLVREIIPSISSAEYFKLYNKLPFESINNENTKLNTNDNEEVKKLEFELAKEVHILILEQQLLSATNYYSWIDKDDNANFAWKMHRLINENKLKENHLSANNANKIKQFFFNNGSILGWTKEEQSAIQENRDYSLRSALLSLEEIAQAKIELQKYYESVYVNGDGNKREIKPFKEILRDTNNFEKAYKERYDKLVSLSAAIIQAKEGGNERQNSSANNNNPIKNTIETNTSNNIIQNNDNIIIQI

SEQ ID NO: 8912 - protein, 465 aa, Helicobacter pylori
  misc_feature (B) LOCATION 1...465
  hypothetical: YES
MDFKKCPNFEKKCAFLCFSNLVLLIEIHSKGLHMQKKKPKNPQPNLFSILDKGDVATNNPVEESDKANKIQEPLPYVVKTQINKASMISRDPIEWAKYLSFEKRVYKDNSKEDVNFFANGEIKESSRVYEANKEGFERRITKRYDLIDRNIDRNREFFIKEIEILTHTNSLKELKEQGLEIQLTHHNETHKKALENGNEIVKEYDHLKDIYQEVERTKDGGLVREIIPSISSAEYFKLYNKLPFESINNENTKLNTNDNEEVKKLEFELAKEVHILILEQQLLSATNYYSWIDKDDNANFAWKMHRLINENKLKENHLSANNANKIKQFFFNNGSILGWTKEEQSAIQENRDYSLRSALLSLEEIAQAKIELQKYYESVYVNGDGNKREIKPFKEILRDTNNFEKAYKERYDKLVSLSAAIIQAKEGGNERQNSSANNNNPIKNTIETNTSNNIIQNNDNIIIQI

SEQ ID NO: 8913 - protein, 465 aa, Helicobacter pylori; identical to SEQ ID NO: 8912
  misc_feature (B) LOCATION 1...465
  hypothetical: YES

SEQ ID NO: 8914 - protein, 73 aa, Helicobacter pylori
  misc_feature (B) LOCATION 1...73
  hypothetical: YES
MMDLESLRGFAYAFFTILFTLFLYAYIFSMYRKQKKGIVDYERYGYLALNDALEDELIEPRHKEVHDKGIKES

SEQ ID NO: 8915 - protein, 73 aa, Helicobacter pylori; identical to SEQ ID NO: 8914
  misc_feature (B) LOCATION 1...73
  hypothetical: YES

SEQ ID NO: 8916 - protein, 152 aa, Helicobacter pylori
  misc_feature (B) LOCATION 1...152
  hypothetical: YES
MRKTISALFLSACIGLSSVHASNALILQTDFSLKDGAVSAMKGVAFSVDSNLKIFDLTHEIPPYNIWEGAYRLYQTASYWPKGSVFVSVVDPGVGTNRKSVVLKTKNGQYFVSPDNGTLTLVAQTLGIDSRAEIDENSIRLKGSKFLSSRPV

SEQ ID NO: 8917 - protein, 180 aa, Helicobacter pylori
  misc_feature (B) LOCATION 1...180
  hypothetical: YES
TVTNIGRDVTVREIDEKTNRLKGSEKSYTFHGRDVYAYTGARLASGAITFEQVGPELPIKVVEIPYQKAKATKGGVKGNIPILDIQYGNVWSNISDKLLNQAGIKRNDTVCVTIFKNSKKQYEGKMPYVASFGDVPEGQPLVYLNSLLNVSVALNMDNFAQKHQIKSGADWNIDIKKCAK

SEQ ID NO: 8918 - protein, 263 aa, Helicobacter pylori
  misc_feature (B) LOCATION 1...263
  hypothetical: YES
MRKTISALFLSACIGLSSVHASNALILQTDFSLKDGAVSAMKGVAFSVDSNLKIFDLTHEIPPYNIWEGAYRLYQTASYWPKGSVFVSVVDPGVGTNRKSVVLKTKNGQYFVSPDNGTLTLVAQTLGIDSVREIDEKANRLKGSEKSYTFHGRDVYAYTGARLASGAITFEQVGPELPIKVVEIPYQKAKATKGGVKGNIPILDIQYGNVWSNISDKLLNQAGIKRNDTVCVTILKIPRNNTKGKCRMSRALAMCQKASRWSI

SEQ ID NO: 8919 - protein, 300 aa, Helicobacter pylori
  misc_feature (B) LOCATION 1...300
  hypothetical: YES
MRKTISALFLSACIGLSSVHASNALILQTDFSLKDGAVSAMKGVAFSVDSNLKIFDLTHEIPPYNIWEGAYRLYQTASYWPKGSVFVSVVDPGVGTNRKSVVLKTKNGQYFVSPDNGTLTLVAQTLGIDSVREIDEKANRLKGSEKSYTFHGRDVYAYTGARLASGAITFEQVGPELPIKVVEIPYQKAKATKGGVKGNIPILDIQYGNVWSNISDKLLNQAGIKRNDTVCVTIFKNSKKQYEGKMPYVASFGDVPEGQPLVYLNSLLNVSVALNMDNFAQKHQIKSGADWNIDIKKCAK

SEQ ID NO: 8920 - protein, 300 aa, Helicobacter pylori; identical to SEQ ID NO: 8919
  misc_feature (B) LOCATION 1...300
  hypothetical: YES

SEQ ID NO: 8921 - protein, 140 aa, Helicobacter pylori
  misc_feature (B) LOCATION 1...140
  hypothetical: YES
MRRSLAFCLLALLGLQVLGARDFSQLKNEELLKLAGTLPSNEAIDYRMEVSKRLKALSAEDAKKFRANFSRIARKNLSKMSEEDFKKMREEVRKELEEKTKGLSAEEIKAKGLNVSVCSGDTRKVWCRAVKKKDEHCSPK

SEQ ID NO: 8922 - protein, 165 aa, Helicobacter pylori
  misc_feature (B) LOCATION 1...165
  hypothetical: YES
IKINMVECQNLLSSCGKNLDNKELGMRRSLAFCLLALLGLQVLGARDFSQLKNEELLKLAGTLPSNEAIDYRMEVSKRLIALSAEDAKNFRANFSRIARKNLSKMSEEDFKKMREEVRKELEEKTKGLSAEEIKAKGLNVSVCSGDTRKVWCRAVKKKDEHCSPK

SEQ ID NO: 8923 - protein, 152 aa, Helicobacter pylori
  misc_feature (B) LOCATION 1...152
  hypothetical: YES
MKKALKILSVGALLFVALNAKDFSKTSDEDLAKMAGVVAPQDIVDYTKELKKRMEKMPEDKRKAFHKQLHEYATKNTDKMTVADFEARQKAIKEALKKGNMEDMDDDFGLRSCKHGKKHKHDKHGKKHGKKHDKDHDDKDHDHHDEDHSDKH

SEQ ID NO: 8924 - protein, 157 aa, Helicobacter pylori
  misc_feature (B) LOCATION 1...157
  hypothetical: YES
FKRKNMKKALKILSVGALLFVALNAKDFSKTSDEDLAKMAGVVAPQDIVDYTKELKKRMEKMPEDKRKAFHKQLHEYATKNTDKMTVADFEARQKAIKEALKKGNMEDMDDDFGLRSCKHGKKHKHDKHGKKHGKKHDKDHDDKDHDHHDEDHSDKH

SEQ ID NO: 8925 - protein, 142 aa, Helicobacter pylori
  misc_feature (B) LOCATION 1...142
  hypothetical: YES
YDFLGVSLHALSPLEEQEFLISYRLKIVDSRVMGEEYSVSKPIVSRIKTAPYVLDYHCSIITRNLPDLKNPLLQIKLERFLLEIALKKEKERVIDCLLKSQVAITHYDHSYKNGTTTTSILNLKALSVKASLDGRYAVFRYF

SEQ ID NO: 8926 - protein, 158 aa, Helicobacter pylori
  misc_feature (B) LOCATION 1...158
  hypothetical: YES
VMRFFSFCYFLFYFLGVSLHALSPLEEQEFLISYRLKIVDSRVMGEEYSVSKPIVSRIKTAPYVLDYHCSIITRNLPDLKNPLLQIKLERFLLEIALKKEKERVIDCLLKSQVAITHYDHSYKNGTTTTSILNLKALSVKASLEGDMLSLDIFRKEEE

SEQ ID NO: 8927 - protein, 154 aa, Helicobacter pylori
  misc_feature (B) LOCATION 1...154
  hypothetical: YES
MKLVSLIVALVFCCFLGAVELPGVYQTQEFLYMKSSFVEFFEHNGKFYAYGISDVXXSKAKKDKLNPNPKLRNRSDKGVVFLSDLIKVGEQSYKGGKAXNFXDGKTXHVRVTQXSNGDLXFTSSYXKWGYVGKTFTWKRLSDEEIKNLKLKRFN

SEQ ID NO: 8928 - protein, 167 aa, Helicobacter pylori
  misc_feature (B) LOCATION 1...167
  hypothetical: YES
MKLVSLIVALVFCCFLGAVELPGVYQTQEFLYMKSSFVEFFEHNGKFYAYGISDVDGSKAKKDKLNPNPKLRNRSDKGVVFLSDLIKVGEQSYKGGKAYNFYDGKTYHVRVTQNSNGDLEFTSSYDKWGYVGKTFTWKRLSDEEIKNLKLKRFNLDEVLKTLKDSPI

SEQ ID NO: 8929 - protein, 181 aa, Helicobacter pylori
  misc_feature (B) LOCATION 1...181
  hypothetical: YES
RIDQIKIMKLVSLIVALVFCCFLGAVELPGVYQTQEFLYMKSSFVEFFEHNGKFYAYGISDVDGSKAKKDKLNPNPKLRNRSDKGVVFLSDLIKVGEQSYKGGKAYNFYDGKTYHVRVTQNSNGDLEFTSSYDKWGYVGNTFTLKRVRGAEISILKLKRFNLMRSFYRQTHLFSIGKAYAT

SEQ ID NO: 8930 - protein, 108 aa, Helicobacter pylori
  misc_feature (B) LOCATION 1...108
  hypothetical: YES
MKPIFSLFFLLIVLKAHPINPLLEPLYFPSYTQFLDLEPHFVIKKKRAYRPFQWGNTIIIKRHDLEERQSNQPSDIFRQNAEINVSSQTFLRGISSASSRIVIDSVAQ

SEQ ID NO: 8931 - protein, 161 aa, Helicobacter pylori
  misc_feature (B) LOCATION 1...161
  hypothetical: YES
PFLKKNKFLQICQYFSAHFKQVLKNEKPLVYYGVLKAKAPNWALWVYEKPLKKEIYMNDKEVVVYEPNLFQATITPLKDKTDFFTILKQLKKQTDGSFKTTINKTTYRLVFKDGKPFSLEFKDDMNNLVTITFSQAEINPKIPNEIFVFNPKDENIDIVRQ

SEQ ID NO: 8932 - protein, 184 aa, Helicobacter pylori
  misc_feature (B) LOCATION 1...184
  hypothetical: YES
MKAFLKICMVLIFVGVAHAKNPLTLSKEEEVLQNLQSFSAHFKQVLKNEKPLVYYGVLKAKAPNWALWVYEKPLKKEIYMNDKEVVVYEPNLFQATITPLKDKTDFFTILKQLKKQTDGSFKTTINKTTYRLVFKDGKPFSLEFKDDMNNLVTITFSQAEINPKIPNEIFVFNPKDENIDIVRQ

SEQ ID NO: 8933 - protein, 132 aa, Helicobacter pylori
  misc_feature (B) LOCATION 1...132
  hypothetical: YES
PRIHDMGDLDSLNISPDPNTPTLLILSALDNSLKDYAPTFNVLKKTFKDRLRVLILLNQPYSSDAIKGFIAPSQTDLMILNPKDTALFDHLNHDALNHSFNMLLYDKHQLIKMYQGIVPAEMLQFDISNLKD

SEQ ID NO: 8934 - protein, 185 aa, Helicobacter pylori
  misc_feature (B) LOCATION 1...185
  hypothetical: YES
MRIKAYFLRFIALVFIVLLGFSACKNSQKSQDSQNNTTQQDSPKTYTAMDLNNQEYTIMGDLDSLNISPDPNTPTLLILSALDNSLKDYAPTFNVLKKTFKDRLRVLILLNQPYSSDAIKGFIAPSQTDLMILNPKDTALFDHLNHDALNHSFNMLLYDKHQLIKMYQGIVPAEMLQFDISNLKD

SEQ ID NO: 8935 - protein, 88 aa, Helicobacter pylori
  misc_feature (B) LOCATION 1...88
  hypothetical: YES
MKKIVVSLCVALGFLSADPAQANKAISDADLIEEIRDLKKIISAQNTEINQLRKVQEVLSGQLGDMRKDILSTRDYCISLRPYIYNWR

SEQ ID NO: 8936 - protein, 89 aa, Helicobacter pylori
  misc_feature (B) LOCATION 1...89
  hypothetical: YES
VMKKIVVSLCVALGFLSADPAQANKAISDADLIEEIRDLKKIISAQNTEINQLRKVQEVLSGQLGDMRKDILSTRDYCISLRPYIYNWR

SEQ ID NO: 8937 - protein, 96 aa, Helicobacter pylori
  misc_feature (B) LOCATION 1...96
  hypothetical: YES
ERIKRRAVMKKIVVSLCVALGFLSADPAQANKAISDADLIEEIRDLKKIISAQNTEINQLRKVQEVLSGQLGDMRKDILSTRDYCISLRPYIYNWR

SEQ ID NO: 8938 - protein, 400 aa, Helicobacter pylori
  misc_feature (B) LOCATION 1...400
  hypothetical: YES
MRSWMKKKYFTLLLQSSVVLAVFIGCSSTRNHTFSALSNQENTDDKLPVVHSIKTINDVSSVGFEWSKVADTYDIDGFVLYRLKKDSKLKRIATIKNPYATHYYDEGLETESSYTYQLATYKGDKISKLSEPILVKTSFINPVESVFASLEYPKSVKVFWSPHPNPSVSKYIIQRQNKDGKFLNVGAVKNRLFVEFFDKDLEDGQKYRYQIIAENFMGDKSRPSVIVEGKTKDLPKEIANVRVSQNLTRQIELSWDKSPEEDVIAYRIYASNNRNDKYKFIAQTTNTSYVDKIEKDNLTRYYKVVAVDKTHLEGALPKEPAMGETSDRPEAPIITKGTIQDSSALIQWENNPSPKIATYAVYRFEANSKTPLRFGNITQNQFVDKDMKVGVAYRYQVVSV

SEQ ID NO: 8939 - protein, 419 aa, Helicobacter pylori
  misc_feature (B) LOCATION 1...419
  hypothetical: YES
MRSWMKKKYFTLLLQSSVVLAVFIGCSSTRNHTFSALSNQENTDDKLPVVHSIKTINDVSSVGFEWSKVADTYDIDGFVLYRLKKDSKLKRIATIKNPYATHYYDEGLETESSYTYQLATYKGDKISKLSEPILVKTSFINPVESVFASLEYPKSVKVFWSPHPNPSVSKYIIQRQNKDGKFLNVGAVKNRLFVEFFDKDLEDGQKYRYQIIAENFMGDKSRPSVIVEGKTKDLPKEIANVRVSQNLTRQIELSWDKSPEEDVIAYRIYASNNRNDKYKFIAQTTNTSYVDKIEKDNLTRYYKVVAVDKTHLEGALPKEPAMGETSDRPEAPIITKGTIQDSSALIQWENNPSPKIATYAVYRFEANSKTPLRFGNITQNQFVDKDMKVGVAYRYQVVSVDKDGLESHPSKEVRLFLER

SEQ ID NO: 8940 - protein, 419 aa, Helicobacter pylori; identical to SEQ ID NO: 8939
  misc_feature (B) LOCATION 1...419
  hypothetical: YES

SEQ ID NO: 8941 - protein, 142 aa, Helicobacter pylori
  misc_feature (B) LOCATION 1...142
  hypothetical: YES
MYKLGIFLLATLLSANTQKVSDIAKDIQHKETLLKKTHEEKNQLNSRLSSLGEAIRSKELQKVEIERQMVALKKSLEKNRNESLVQEKVLTNYRKSLDHLQKQRSFLQKRVFDTLLEDFLFSQALKGQNLASSNDVILLSGV

SEQ ID NO: 8942 - protein, 147 aa, Helicobacter pylori
  misc_feature (B) LOCATION 1...147
  hypothetical: YES
LGGLDMYKLGIFLLATLLSANTQKVSDIAKDIQHKETLLKKTHEEKNQLNSRLSSLGEAIRSKELQKVEIERQMVALKKSLEKNRNESLVQEKVLTNYRKSLDHLQKQRSFLQKRVFDTLLEDFLFSQALKGQNLASSNDVILLSGV

SEQ ID NO: 8943 - protein, 192 aa, Helicobacter pylori
  misc_feature (B) LOCATION 1...192
  hypothetical: YES
MRSTNQRLSLLEKERQNLNALLKRLNIIKQNGKNEERVSLKKSSQALEVKQVASSYQNINTTSYNGPKTIAPLNDYEVVQKFGPYIDPVYNLKIFSESITLVSKTPNALVRNVLDGKIVFAKEINMLKKVVIIEHKNGIRTIYSQLDKIAPTIKSGMRIQKGYVLGRIDQRLGFEVTMREKHINPLELIARN

SEQ ID NO: 8944 - protein, 197 aa, Helicobacter pylori
  misc_feature (B) LOCATION 1...197
  hypothetical: YES
ACKKIMRSTNQRLSLLEKERQNLNALLKRLNIIRQNRENEERVSLKKSSQALEVKQVASSYQNINTTSYNGPKTIAPLNDYEVVQKFGPYIDPVYNLKIFSESITLVSKTPNALVRNVLDGKIVFAKEINMLKKVVIIEHKNGIRTIYSQLDKIAPTIKSGMRIQKGYVLGRIDQRLGFEVTMREKHINPLELIARN

SEQ ID NO: 8945 - protein, 261 aa, Helicobacter pylori
  misc_feature (B) LOCATION 1...261
  hypothetical: YES
VAFENLHQSTLSKMSQLSQEEKKLNVQALEVKSSIQKISSVIDEQKTRESTLKSLQTEQNKLILSMQKDYAIYNQRLSLLEKERQNLNALLKRLNIIKQNRENEERVSLKKSSQALEVKQVASSYQNINTTSYNGPKTIAPLNDYEVVQKFGPYIDPVYNLKIFSESITLVSKTPNALVRNVLDGKIVFAKEINMLKKVVIIEHKNGIRTIYSQLDKIAPTIKSGMRIQKGYVLGRIDQRLGFEVTMREKHINPLELIARN

SEQ ID NO: 8946 - protein, 400 aa, Helicobacter pylori
  misc_feature (B) LOCATION 1...400
  hypothetical: YES
MYKLGIFLLATLLSANTQKVSDIAKDIQHKETLLKKTHEEKNQLNSRLSSLGEAIRSKELQKVEIERQMVALKKSLEKNRNESLVQEKVLTNYRKSLDHLQKQRSFLQKRVFDTLLEDFLFSQALKGQNLASSNDVILQVAFENLHQSTLSKMSQLSQEEKKLNVQALEVKSSIQKISSVIDEQKTRESTLKSLQTEQNKLILSMQKDYAIYNQRLSLLEKERQNLNALLKRLNIIKQNRENEERVSLKKSSQALEVKQVASSYQNINTTSYNGPKTIAPLNDYEVVQKFGPYIDPVYNLKIFSESITLVSKTPNALVRNVLDGKIVFAKEINMLKKVVIIEHKNGIRTIYSQLDKIAPTIKSGMRIQKGYVLGRIDQRLGFEVTMREKHINPLELIARN

SEQ ID NO: 8947 - protein, 54 aa, Helicobacter pylori
  misc_feature (B) LOCATION 1...54
  hypothetical: YES
MKKQILTGVLLSVLAVSSAYAHKDKKDAKKPELSSQLVAHKDKKDAKKPKNSVA

SEQ ID NO: 8948 - protein, 61 aa, Helicobacter pylori
  misc_feature (B) LOCATION 1...61
  hypothetical: YES
DHHKEFRMKKQILTGVLLSVLAVSSAYAHKDKKDAKKPELSSQLVAHKDKKDAKKPKNSVA

SEQ ID NO: 8949 - protein, 466 aa, Helicobacter pylori
  misc_feature (B) LOCATION 1...466
  hypothetical: YES
MKALKTFLKKSLILLLAIALNHLNAVAMIVDNPTQNAWNGAKRAWDESKWAKHLATITERIKLAQDTLDRANQTLNSINKVNDVLNKTNQFLTGSILSIPNPMQYVEKIQSFAKQVQANTERIKENAQNYDIRNQIAAKRISEKCPELNWDVSQDASPTEKNLHQFFTSKGKESANTKALKDFANAIGNTQISTANDLGAGLRGRALLEYICIQKGNLEAAKKIQLLDSQMTLALLNNDYTAYEKLRAEKEELKRQIASNVYAKVKQLVVASQDRAFSQMDNELGVKTFGFNDENVKKGYCKKENRNGKSECIPNMLNVNRLKAQFDELNLDYSRDIAGKKGEAAAKVFNDYKHRFQQLSVETALEIAQNLSFMNKTLGLMVQMQSYAFKQQMGYFEDIIPADALKDDKEHQENLEQKQQEIEKVYRAKLDAYGFPNGSVGKASGVNSNSNNEAPSSDNIQSFNPY

SEQ ID NO: 8950 - protein, 466 aa, Helicobacter pylori; identical to SEQ ID NO: 8949
  misc_feature (B) LOCATION 1...466
  hypothetical: YES

SEQ ID NO: 8951 - protein, 467 aa, Helicobacter pylori
  misc_feature (B) LOCATION 1...467
  hypothetical: YES
GMKALKTFLKKSLILLLAIALNHLNAVAMIVDNPTQNAWNGAKRAWDESKWAKHLATITERIKLAQDTLDRANQTLNSINKVNDVLNKTNQFLTGSILSIPNPMQYVEKIQSFAKQVQANTERIKENAQNYDIRNQIAAKRISEKCPELNWDVSQDASPTEKNLHQFFTSKGKESANTKALKDFANAIGNTQISTANDLGAGLRGRALLEYICIQKGNLEAAKKIQLLDSQMTLALLNNDYTAYEKLRAEKEELKRQIASNVYAKVKQLVVASQDRAFSQMDNELGVKTFGFNDENVKKGYCKKENRNGKSECIPNMLNVNRLKAQFDELNLDYSRDIAGKKGEAAAKVFNDYKHRFQQLSVETALEIAQNLSFMNKTLGLMVQMQSYAFKQQMGYFEDIIPADALKDDKEHQENLEQKQQEIEKVYRAKLDAYGFPNGSVGKASGVNSNSNNEAPSSDNIQSFNPY

SEQ ID NO: 8952 - protein, 92 aa, Helicobacter pylori
  misc_feature (B) LOCATION 1...92
  hypothetical: YES
MFKSRLNSWILLGILGVLVVVFWDVIKYKIEDLQHDHYLSQVKEREEYYKNHIEEALKKDSECFEKGGDKVDCSAAMRIAAGERNRRMLEIK

SEQ ID NO: 8953 - protein, 92 aa, Helicobacter pylori; identical to SEQ ID NO: 8952
  misc_feature (B) LOCATION 1...92
  hypothetical: YES

SEQ ID NO: 8954 - protein, 100 aa, Helicobacter pylori
  misc_feature (B) LOCATION 1...100
  hypothetical: YES
SNFKKGFFMFKSRLNSWILLGILGVLVVVFWDVIKYKIEDLQHDHYLSQVKEREEYYKNHIEEALKKDSECFEKGGDKVDCSAAMRIAAGERNRRMLEIK

SEQ ID NO: 8955 - protein, 206 aa, Helicobacter pylori
  misc_feature (B) LOCATION 1...206
  hypothetical: YES
LKFQIVSLLLAFLLASCLPPKGHHSGLVNMYIAHQGQSVRTYWRKVDRGVVAKHNETLKENPKIKLKDPKGPLFMLGSNRFMLLWKNRYTLAKVQSFKLEPGFYYLDSFSVETQKGILQSAPGYSYTKNGYDFKNNRPFFLAFEVKPDSKIVLPSVELSLIKTPRGFLGVFLFDNNEKGANTPWIEGSLNLKLKNASFKDAWELER

SEQ ID NO: 8956 - protein, 209 aa, Helicobacter pylori
  misc_feature (B) LOCATION 1...209
  hypothetical: YES
GICLKFQIVSLLLAFLLASCLPPKGHHSGLVNMYIAHQGQSVRTYWRKVDRGVVAKHNETLKENPKIKLKDPKGPLFMLGSNRFMLLWKNRYTLAKVQSFKLEPGFYYLDSFSVETQKGILQSAPGYSYTKNGYDFKNNRPFFLAFEVKPDSKIVLPSVELSLIKTPRGFLGVFLFDNNEKGANTPWIEGSLNLKLKNASFKDAWELER

SEQ ID NO: 8957 - protein, 68 aa, Helicobacter pylori
  misc_feature (B) LOCATION 1...68
  hypothetical: YES
WGFADTVSLEISVMLLDIVKPSDALKNDVAALGKQMIGEFLGQDTLNSLESLLQNQQIKSVLNKVLAG

SEQ ID NO: 8958 - protein, 105 aa, Helicobacter pylori
  misc_feature (B) LOCATION 1...105
  hypothetical: YES
RLWSIYEQGLGDLIPNLGKKGIFAPYGLSQVWQKGDFSFNAQGNVFVQNSTFSNANGGTLSFNAGNSLIFAGNNHIAFTNHSGTLNLLSNQVSNINVTMLNAATA

SEQ ID NO: 8959 - protein, 126 aa, Helicobacter pylori
  misc_feature (B) LOCATION 1...126
  hypothetical: YES
VPLSLGGNLLNPNNSSVLNLKNSQLVFSDQGSLNIANIDLLSDLNGNKNRVYNIIQADMNGNWYERINFFGMRINDGIYDAKNQTYSFTNPLNNAVKFTESFFIHRLCGSLSQIQKKKNTIVSPRL

SEQ ID NO: 8960 - protein, 155 aa, Helicobacter pylori
  misc_feature (B) LOCATION 1...155
  hypothetical: YES
GAVSLRRQFNLSNNSSLDFQGSSAITSNTAFNFYDNAFSQSPITFHQALDIKVPLSLGGNLLNPNNSSVLNLKNSQLVFSDQGSLNIANIDLLSDLNGNKNRVYNIIQADMNGNWYERINFFGMRINDGIYDAKNQTYSFTNPLNNALKSPRALK

SEQ ID NO: 8961 - protein, 225 aa, Helicobacter pylori
  misc_feature (B) LOCATION 1...225
  hypothetical: YES
PLSVTLSQSRALKTRSITLTLKSLTTRRFTNNANDVCSSSADAHGVFYLTSSVKGYYNPNQSYQASGSNNTTKNNNLTSESSVISQTYNAQGNPISALHVYNKGYNFSNIKALGQMALKLYPEIKKILGNDFSLSSLSNLKGDALNQLTKLITPSDWKNINELIDNANNSVVQNFNNGTLIIGATKIGQTDTNSAVVFGGLGYQKPCDYTDIVCQKFRGTYLGQL

SEQ ID NO: 8962 - protein, 344 aa, Helicobacter pylori
  misc_feature (B) LOCATION 1...344
  hypothetical: YES
VKCGKKGILVSTRKAMFLCKIPLSLTLMEARSVLTQEIRSFLPETTTSLSLTILERSICCLIKFLTLTSPCLTQQRPKINATNNNVSVSQGNLFINASCVQQSDPTTASATNPCTTAQNNASSSNASNNAPIALNNNDESLVVTANGFNFSGNIYANGVVDFSKIKGSANVKNLYLYNNAQFQANNLTISNQAVLEKNASFVTNNLNIQGAFNNNATQKIEVLQNLVIASNASLSTGIYGLEVGGALNNLGAIHFNLENSQTPVNPLIQVGGIINLNTTQTPFMNVSVANGGTYTLLKSSRYIDYNINPNSLQSYLKLYTLININGNHIEEKNGVLTYLGQRVL

SEQ ID NO: 8963 - protein, 458 aa, Helicobacter pylori
  misc_feature (B) LOCATION 1...458
  hypothetical: YES
QDKGLLLSVALPNSNNASQNNILSLSVLHNQIKMSYGNKVMDFTPPTLQDYIVGIQGQSALNQIEAVGGNNAIKWLSTLMMETKENPLFAPIYLENHSLNEILGVTKDLQNTASLISNPNFRNNATSLLEMASYTQQTSRLTKLSDFRAREGESNFSERLLELKNKRFSDPNPSEVFVKYSQLSKHPNNLWIQGVGGASFISGGNGTLYGLNVGYDRLVKSVILGGYVAYGYSGFNGNIMHSLANNVDVGMYARAFLKRNEFTLSANETYGGNASHINSSNSLLSVLNQRYNYNTWTTSVNGNYGYDFMFKQKSVVLKPQVGLSYHFIGLSGMKGKMQNPAYQQFVMHSNPSNESVLTLNMGLESRKYFGKNSYYFVTARLGRDLLIKAKGDNVVRFVGENTLLYRKGEIFNTFASVITGGEMHLWRLMYVNAGVGLKMGLQYQDLNITGNVGMRVAF

SEQ ID NO: 8964 - protein, 565 aa, Helicobacter pylori
  misc_feature (B) LOCATION 1...565
  hypothetical: YES
VYSYSDDAQGVFYLTSSVKGYYNPNQSYQASGSNNTTKNNNLTSESSVISQTYNAQGNPISALHVYNKGYNFSNIKALGQMALKLYPEIKKILGNDFSLSSLSNLKGDALNQLTKLITPSDWKNINELIDNANNSVVQNFNNGTLIIGATKIGQTDTNSAVVFGGLGYQKPCDYTDIVCQKFRGTYLGQLLESNSADLGYIDTTFNAKEIYLTGTLGSGNAWGTGGSASVTFNSQTSLILNQANIVSSQTDGIFSMLGQEGINKVFNQAGLANILGEVAMQSINKAGGLGNLIVNTLGSDSVIGGYLTPEQKNQTLSQLLGQNNFDNLMNDSGLNTAIKDLIRQKLGFWTGLVGGLAGLGGIDLQNPEKLIGSMSINDLLSKKGLFNQITGFISANDIGQVISVMLQDIVKPSDALKNDVAALGKQMIGEFLGQDTLNSLESLLQNQQIKSVLDKVLAAKGLGSIYEQGLGDLIPNLGKKGIFAPYGLSQVWQKGDFSFNAQGNVFVQNSTFSNANGGTLSFNAGNSLIFAGNNHIAFTNHSGTLNLLSNQVSNINVTMLNAATA

SEQ ID NO: 8965 - protein, 786 aa, Helicobacter pylori
  misc_feature (B) LOCATION 1...786
  hypothetical: YES
LCKIPLSLTLMEARSVLTQEIRSFLPETTTSLSLTILERSICCLIKFLTLTSPCLTQQRPKINATNNNVSVSQGNLFINASCVQQSDPTTASATNPCTTAQNNASSSNASNNAPIALNNNDESLVVTANGFNFSGNIYANGVVDFSKIKGSANVKNLYLYNNAQFQANNLTISNQAVLEKNASFVTNNLNIQGAFNNNATQKIEVLQNLVIASNASLSTGIYGLEVGGALNNLGAIHFNLENSQTPVNPLIQVGGIINLNTTQTPFMNVSVANGGTYTLLKSSRYIDYNINPNSLQSYLKLYTLININGNHIEEKNGVLTYLGQRVLLQDKGLLLSVALPNSNNASQNNILSLSVLHNQIKMSYGNKVMDFTPPTLQDYIVGIQGQSALNQIEAVGGNNAIKWLSTLMMETKENPLFAPIYLENHSLNEILGVTKDLQNTASLISNPNFRNNATSLLEMASYTQQTSRLTKLSDFRAREGESNFSERLLELKNKRFSDPNPSEVFVKYSQLSKHPNNLWIQGVGGASFISGGNGTLYGLNVGYDRLVKSVILGGYVAYGYSGFNGNIMHSLANNVDVGMYARAFLKRNEFTLSANETYGGNASHINSSNSLLSVLNQRYNYNTWTTSVNGNYGYDFMFKQKSVVLKPQVGLSYHFIGLSGMKGKMQNPAYQQFVMHSNPSNESVLTLNMGLESRKYFGKNSYYFVTARLGRDLLIKAKGDNVVRFVGENTLLYRKGEIFNTFASVITGGEMHLWRLMYVNAGVGLKMGLQYQDLNITGNVGMRVAF

SEQ ID NO: 8966 - protein, 1484 aa, Helicobacter pylori
  misc_feature (B) LOCATION 1...1484
  hypothetical: YES
GAVSLRGQFNLSNNSSLDFQGSSAITSNTAFNFYDNAFSQSPITFHQALDIKVPLSLGGNLLNPNNSSVLNLKNSQLVFSDQGSLNIANIDLLSDLNGNKNRVYNIIQADMNGNWYERINFFGMRINDGIYDAKNQTYSFTNPLNNALKITESFKNNQLSVTLSQIPGIKNTLYNIGSEIFNYQKVYNNANGVYSYSDDAQGVFYLTSSVKGYYNPNQSYQASGSNNTTKNNNLTSESSVISQTYNAQGNPISALHVYNKGYNFSNIKALGQMALKLYPEIKKILGNDFSLSSLSNLKGDALNQLTKLITPSDWKNINELIDNANNSVVQNFNNGTLIIGATKIGQTDTNSAVVFGGLGYQKPCDYTDIVCQKFRGTYLGQLLESISADLGYIDTTFNAKEIYLTGTLGSGNAWGTGGSASVTFNSQTSLILNQANIVSSQTDGIFSMLGQEGINKVFNQAGLANILGEVAMQSINKAGGLGNLIVNTLGSDSVIGGYLTPEQKNQTLSQLLGQNNFDNLMNDSGLNTAIKDLIRQKLGFWTGLVGGLAGLGGIDLQNPEKLIGSMSINDLLSKKGLFNQITGFISANDIGQVISVMLQDIVKPSDALKNDVAALGKQMIGEFLGQDTLNSLESLLQNQQIKSVLDKVLAAKGLGSIYEQGLGDLIPNLGKKGIFAPYGLSQVWQKGDFSFNAQGNVFVQNSTFSNANGGTLSFNAGNSLIFAGNNHIAFTNHSGTLNLLSNQVSNINVTMLNASNGLKINATNNNVSVSQGNLFINASCVQQSDPTTASATNPCTTAQNNASSSNASNNAPIALNNNDESLVVTANGFNFSGNIYANGVVDFSKIKGSANVKNLYLYNNAQFQANNLTISNQAVLEKNASFVTNNLNIQGAFNNNATQKIEVLQNLVIASNASLSTGIYGLEVGGALNNLGAIHFNLENSQTPVNPLIQVGGIINLNTTQTPFMNVSVANGGTYTLLKSSRYIDYNINPNSLQSYLKLYTLININGNHIEEKNGVLTYLGQRVLLQDKGLLLSVALPNSNNASQNNILSLSVLHNQIKMSYGNKVMDFTPPTLQDYIVGIQGQSALNQIEAVGGNNAIKWLSTLMMETKENPLFAPIYLENHSLNEILGVTKDLQNTASLISNPNFRNNATSLLEMASYTQQTSRLTKLSDFRAREGESNFSERLLELKNKRFSDPNPSEVFVKYSQLSKHPNNLWIQGVGGASFISGGNGTLYGLNVGYDRLVKSVILGGYVAYGYSGFNGNIMHSLANNVDVGMYARAFLKRNEFTLSANETYGGNASHINSSNSLLSVLNQRYNYNTWTTSVNGNYGYDFMFKQKSVVLKPQVGLSYHFIGLSGMKGKMQNPAYQQFVMHSNPSNESVLTLNMGLESRKYFGKNSYYFVTARLGRDLLIKAKGDNVVRFVGENTLLYRKGEIFNTFASVITGGEMHLWRLMYVNAGVGLKMGLQYQDLNITGNVGMRVAF

SEQ ID NO: 8967 - protein, 179 aa, Helicobacter pylori
  misc_feature (B) LOCATION 1...179
  hypothetical: YES
MASLAFVQAFLESFKGFLSQATLISVLIASVLILFCAILLLLALLLRNRWASYITTAAFLGAFLSMPFVLNVLLTQAIYPIETRILHANPLSYSNAFSLQVGVKNISKFSLNKCVLRLEVLKNPHNFVEERAFKWFVKKSYEKTFKEKILPEESKVFSFFIDDYPYSKTAPYQVSLFCL

SEQ ID NO: 8968 - protein, 184 aa, Helicobacter pylori
  misc_feature (B) LOCATION 1...184
  hypothetical: YES
RALKTHGALAFVQAFLESFKGFLSQATLISVLIASVLILFCAILLLLALLLRNRWASYITTAAFLGAFLSMPFVLNVLLTQAIYPIETRILHANPLSYSNAFSLQVGVKNISKFSLNKCVLRLEVLKNPHNFVEERAFKWFVKKSYEKTFKEKILPEESKVFSFFIDDYPYSKTAPYQVSLFCL

SEQ ID NO: 8969 - protein, 103 aa, Helicobacter pylori
  misc_feature (B) LOCATION 1...103
  hypothetical: YES
ILKGGFLGFFIVALSSYYGVKKRLDLRKQDSKEKEEKQKFQKFALGLEMSFNVWRLGGYGVLLGILGVLLFLHLFNGLPFLIGVFVSSLSSALLRFLNNNGKF

SEQ ID NO: 8970 - protein, 134 aa, Helicobacter pylori
  misc_feature (B) LOCATION 1...134
  hypothetical: YES
MCQIQCLLILLSINIVSAIIVYFFQAFQGVLNFEGGFLGFFIVALSSYYGVKKRLDLRKQDSKEKEEKQKFQKFALGLEMSFNVWRLGGYGVLLGILGVLLFLHLFNGLPFLIGVFVSSLSSALLRFLNNNGKF

SEQ ID NO: 8971 - protein, 92 aa, Helicobacter pylori
  misc_feature (B) LOCATION 1...92
  hypothetical: YES
MACEFLKKPKYYKFIEGANYLSLGLSMVVAILMGVAIGYGLKKLTHISWLFWLGVIWGVLASFLNVYKAYKNMQKDYEELAKDPKYTQNKTK

SEQ ID NO: 8972 - protein, 92 aa, Helicobacter pylori; identical to SEQ ID NO: 8971
  misc_feature (B) LOCATION 1...92
  hypothetical: YES

SEQ ID NO: 8973 - protein, 81 aa, Helicobacter pylori
  misc_feature (B) LOCATION 1...81
  hypothetical: YES
RAWRMKSMRFSYIEPRAKYLISKLSKIWVFYIFLSFVLIGGLVWFMHNAIKRAQDNASSLTIQEELYRCYITRLSVKMIIL

SEQ ID NO: 8974 - protein, 124 aa, Helicobacter pylori
  misc_feature (B) LOCATION 1...124
  hypothetical: YES
TIQERLYRHEISRLQVKTDETLKLIKEAKKRLNYNDDIRDVLQGLLNIVPDLITINSIEIDQQSVVVSGKTPSKEAFYFLFQNKLNPMFDYSRAEFFPLSDGWFNFVSTNFSNSLLIKNPESIK

SEQ ID NO: 8975 - protein, 123 aa, Helicobacter pylori
  misc_feature (B) LOCATION 1...123
  hypothetical: YES
IQERLYRHEISRLQVKTDETLKLIKEAKKRLNYNDDIRDVLQGLLNIVPDLITINSIEIDQQSVVVSGKTPSKEAFYFLFQNKLNPMFDYSRAEFFPLSDGWFNFVSTNFSNSLLIKNPESIK

SEQ ID NO: 8976 - protein, 177 aa, Helicobacter pylori
  misc_feature (B) LOCATION 1...177
  hypothetical: YES
MRFSYIEPRAKYLISKLSKIWVFYIFLSFVLIGGLVWFMHNAIKRAQDNASSLTIQERLYRHEISRLQVKTDETLKLIKEAKKRLNYNDDIRDVLQGLLNIVPDLITINSIEIDQQSVVVSGKTPSKEAFYFLFQNKLNPMFDYSRAEFFPLSDGWFNFVSTNFSNSLLIKNPESIK

SEQ ID NO: 8977 - protein, 156 aa, Helicobacter pylori
  misc_feature (B) LOCATION 1...156
  hypothetical: YES
FYTGKKGACMRKILLMGLILQALFGEETAQELLQCSAIFESKKAELKEDLRQLSEKEQSLRILQTENARLLDEKSDLLNKKEKEIDEKLKNLAAKEEAFKTLQTEEKKRLKNLIEENEGILREIKQAKDSKIGETYSKMKDSKSALILENLPTQNA

SEQ ID NO: 8978 - protein, 157 aa, Helicobacter pylori
  misc_feature (B) LOCATION 1...157
  hypothetical: YES
FYTGKKGACMRKILLMGLILQALFGEETAQELLQCSAIFESKKAELKEDLRQLSEKEQSLRILQTENARLLDEKSDLLNKKEKEIDEKLKNLAAKEEAFKTLQTEEKKRLKNLIEENEGILREIKQAKDSKIGETYSKMKDSKSALILENLPTQNAL

SEQ ID NO: 8979 - protein, 222 aa, Helicobacter pylori
  misc_feature (B) LOCATION 1...222
  hypothetical: YES
MRKILLMGLILQALFGEEAAQELLQCSAIFESKKAELKEDLRQLSEKEQSLRILQTENARLLDEKSDLLNKKEKEIDEKLKNLAAKEEAFKTLQTEEKKRLKNLIEENEGILREIKQAKDSKIGETYSKMKDSKSALILENLPTQNALEILMALKPQELGKILAKMDPKKAAALTELWQKPPKENKENKESQKTTDPTPPTPPTPPKEPTLKDPNVKEPTGV

SEQ ID NO: 8980 - protein, 67 aa, Helicobacter pylori
  misc_feature (B) LOCATION 1...67
  hypothetical: YES
YKKGNQIMNIQTKKRFLANLLLFSLFSCLKAETLSEDHQILLSSDAFHRGDFATAQKGYMNLYRANQ

SEQ ID NO: 8981 - protein, 378 aa, Helicobacter pylori
  misc_feature (B) LOCATION 1...378
  hypothetical: YES
ISIEQTNKVVYAKEAAISAASLGDIKTAMHLAMLYQKITNNRNDVSINKILVDGYAQMGQIDKAIELLHKIRKEEKTIATDNVLGTLYLTQKRLDKAFPLLNKFYNQVHDEDSLEKLITIYFLQNRKKEGLVLLQSHIDRYGCSEQLCQKALNTFTQFNELDLAKTTFARLYEKNPIVQNAQFYIGVLILLKEFDKAQQIAELFPFDRRLLLDLYTAQKKFDQASKQASLIYQERKDPKFLGLEAIYHYESLSANKKKLTKEEMLPIIQKLEQATKERQAWLAKTKDKEDAQDAFFYNFLGYSLIDYDMDVKRGMDLVRKALALDSNSVLYLDSLAWGYYKLGNCLEAKKIFSSIAKELIQNEPELKEHNKIIQECKK

SEQ ID NO: 8982 - protein, 431 aa, Helicobacter pylori
  misc_feature (B) LOCATION 1...431
  hypothetical: YES
MNIQTKKRFLANLLLFSLFSCLKAETLSEDHQILLSSDAFHRGDFATAQKGYMNLYKQTNKVVYAKEAAISAASLGDIKTAMHLAMLYQKITNNRNDVSINKILVDGYAQMGQIDKAIELLHKIRKEEKTIATDNVLGTLYLTQKRLDKAFPLLNKFYNQVHDEDSLEKLITIYFLQNRKKEGLDLLQSHIDRYGCSEQLCQKALNTFTQFNELDLAKTTFARLYEKNPIVQNAQFYIGVLILLKEFDKAQQIAELFPFDRRLLLDLYTAQKKFDQASKQASLIYQERKDPKFLGLEAIYHYESLSANKKKLTKEEMLPIIQKLEQATKERQAWLAKTKDKEDAQDAFFYNFLGYSLIDYDMDVKRGMDLVRKALALDSNSVLYLDSLAWGYYKLGNCLEAKKIFSSIAKELIQNEPELKEHNKIIQECKK

SEQ ID NO: 8983 - protein, 100 aa, Helicobacter pylori
  misc_feature (B) LOCATION 1...100
  hypothetical: YES
AKNTIFNNANFNNSTSFNFNNSSATTSFVGDFTNANSNLQIAGNAVFGNSTNGSQNTANFNNTGSVNIAGNATFDNVVFNSPTNTGVKGKVTLNNITLKT

SEQ ID NO: 8984 - protein, 99 aa, Helicobacter pylori
  misc_feature (B) LOCATION 1...99
  hypothetical: YES
KNTIFNNANFNNSTSFNFNNSSATTSFVGDFTNANSNLQIAGNAVFGNSTNGSQNTANFNNTGSVNIAGNATFDNVVFNSPTNTGVKGKVTLNNITLKT

SEQ ID NO: 8985 - protein, 129 aa, Helicobacter pylori
  misc_feature (B) LOCATION 1...129
  hypothetical: YES
KLERSFVFGDGTIVFSAHSVINIGEAITNGNPITLVSSSKAIEYNDAFSKNLWQLINYQGHGGSRKKSFLVRVMASMMWCILSTTKPTISKRFFHPTAFLSGVWALAWCLIMWIWKNRIVCIIKTLSVL

SEQ ID NO: 8986 - protein, 202 aa, Helicobacter pylori
  misc_feature (B) LOCATION 1...202
  hypothetical: YES
QEKVVSSAGNGVYDVVYSLNNQTYNFQEVFSPNSISIRRLGVGMVFDYVDMEKSDRLYYQNALGFMTYMPNSYNNNLGNLNNTIYYYDNSIDFYASGKTLFTKAEFSQTFTGQNSAIVFGAKNIWTSVSDAPQSNVIIRFGDNKGAGSNDASGHCWNLQCIGFITGHYEAQKIYITGSIESGNRISSGGARALILTGFKAFF

SEQ ID NO: 8987 - protein, 246 aa, Helicobacter pylori
  misc_feature (B) LOCATION 1...246
  hypothetical: YES
MKQFKKKPKKIKRSHQNQKTILKRPLWLMPLLIGGFASGVYADGTDILGLSWGEKSQKVCVHRPWYAIWSCDKWEEKTQQFTGNQLITKTWAGGNAANYYHSQNNQDITANLKNDNGTYFLSGLYNYTGGEYNGGNLDIELGSNATFNLGASSGNSFTSWYPNGHTDVTFSAGTINVNNSVEVGNRVGSGAGTHTGTATLNLNANKVTINSNISAYKTSQVNVGNANSVITINSVSLNGEYLQFFS

SEQ ID NO: 8988 - protein, 246 aa, Helicobacter pylori; identical to SEQ ID NO: 8987
  misc_feature (B) LOCATION 1...246
  hypothetical: YES

SEQ ID NO: 8989 - protein, 325 aa, Helicobacter pylori
  misc_feature (B) LOCATION 1...325
  hypothetical: YES
LAGLXVGCXRMKQTFWXLSWGEKSQKVCVHRPWYAIWSCDKWEEKTQQFTGNQLITKTWAGGNAANYYHSQNNQDITANLKNDNGTYFLSGLYNYTGGEYNGGNLDIELGSNATFNLGASSGNSFTSWYPNGHTDVTFSAGTINVNNSVEVGNRVGSGAGTHTGTATLNLNANKVTINSNISAYKTSQVNVGNANSVITINSVSLNGETCXSLARVGVGANCSTSGPSYSFKGTTNATNTTFSXSSGSFTFEENATFSGAKLNGGAFTFNKKFNATNNTAFNSGSFTFKGTSSFNGANFSNASYTFNNQATFQNSSFNGGTFTFN

SEQ ID NO: 8990 - protein, 431 aa, Helicobacter pylori
  misc_feature (B) LOCATION 1...431
  hypothetical: YES
MGNTCSSLARVGVGANCSTSGPSYSFKGTTNATNTTFSNSSGSFTFEENATFSGAKLNGGAFTFNKKFNATNNTAFNSGSFTFKGTSSFNGANFSNASYTFNNQATFQNSSFNGGTFTFNDQTNQSTQHPQIQNSSFSGSATTLKGFATFEQAFNNSNHQLTIQNASFNNATFNNTGKITIEKDASFNNTSFNTPVDTNNMTISGGVTLSGKNDLKNGATLDFGSSKITLTQGTTFNLTSLGSEKSVTILNSRGGITYNHLLNHAINSLTNALKTNESSSKPQSFAQGLWDMITYNGVTGQLLNENAATSKPTDSSPSKSSTNSTQVYQVGYKIGDTIYKLQETFSHNSIIIQALESGTYTPPPVINGSKFDLSASNYINADMPWYNHKYYIPKSQKFYRERDLFNCRAFKYGGATLTRLNKPLAQVIAIW

SEQ ID NO: 8991 - protein, 571 aa, Helicobacter pylori
  misc_feature (B) LOCATION 1...571
  hypothetical: YES
LPSVQIWGSYTNSFKQTFSASNSNLVIGYNATWTDPNVSSSDTVAFGDPSGSALNGHCGPWPYYQCTGTTNGTYSAYHVYITANLRSGNRIGTGGAANLIFNGVDSINIANATITQHNAGAYSSSMTFSTQNMDNSQNLNGLNSNGKLLVYGTTFTNQAKDGKFIFNAGQATFENTNFNGGSYQFSGDSLNFSNNNQFNSGSFEIGAKNTIFNNANFNNSTSFNFNNSSATTSFVGDFTNANSNLQIAGNAVFGNSTNGSQNTANFNNTGSVNIAGNATFDNVVFNSPTNTSVKGKVTLNNITLKNLNAPLSFGDGTIVFSAHSVINIGEAITNGNPITLVSSSKAIEYNDAFSKNLWQLINYQGHGASSEKLVSSAGNGVYDVVYSLNNQTYNFQEVFSPNSISIRRLGVGMVFDYVDMEKSDRLYYQNALGFMTYMPNSYNNNLGNLNNTIYYYDNSIDFYASGKTLFTKAEFSQTFTGQNSAIVFGAKNIWTSVSDAPQSNVIIRFGDNKGAGSNDASGHCWNLQCIGFITGHYEAQKIYITGSIESGNRISSGGARALILTGFKAFF

SEQ ID NO: 8992 - protein, 594 aa, Helicobacter pylori
  misc_feature (B) LOCATION 1...594
  hypothetical: YES
MGNTCSSLARVGVGANCSTSGPSYSFKGTTNATNTTFSNSSGSFTFEENATFSGAKLNGGAFTFNKKFNATNNTAFNSGSFTFKGTSSFNGANFSNASYTFNNQATFQNSSFNGGTFTFNDQTNQSTQHPQIQNSSFSGSATTLKGFATFEQAFNNSNHQLTIQNASFNNATFNNTGKITIEKDASFNNTSFNTPVDTNNMTISGGVTLSGKNDLKNGATLDFGSSKITLTQGTTFNLTSLGSEKSVTILNSRGGITYNHLLNHAINSLTNALKTNESSSKPQSFAQGLWDMITYNGVTGQLLNENAATSKPTDSSPSKSSTNSTQVYQVGYKIGDTIYKLQETFSHNSIIIQALESGTYTPPPVINGSKFDLSASNYINADMPWYNHKYYIPKSQILQRAGLIQLPSVQIWGSYTNSFKQTFSASNSNLVIGYNATWTDPNVSSSDTVAFGDPSGSALNGHCGPWPYYQCTGTTNGTYSAYHVYITANLRSGNRIGTGGAANLIFNGVDSINIANATITQHNAGAYSSSMTFSTQNMDNSQNLNGLNSNGKLLVYGTTFTNQAKDGKFIFNAGQATFENTNFNGGSYQFSAIA

SEQ ID NO: 8993 - protein, 1213 aa, Helicobacter pylori
  misc_feature (B) LOCATION 1...1213
  hypothetical: YES
MKQFKKKPKKIKRSHQNQKTILKRPLWLMPLLIGGFASGVYADGTDILGLSWGEKSQKVCVHRPWYAIWSCDKWEEKTQQFTGNQLITKTWAGGNAANYYHSQNNQDITANLKNDNGTYFLSGLYNYTGGEYNGGNLDIELGSNATFNLGASSGNSFTSWYPNGHTDVTFSAGTINVNNSVEVGNRVGSGAGTHTGTATLNLNANKVTINSNISAYKTSQVNVGNANSVITINSVSLNGDTCSSLARVGVGANCSTSGPSYSFKGTTNATNTTFSNSSGSFTFEENATFSGAKLNGGAFTFNKKFNATNNTAFNSGSFTFKGTSSFNGANFSNASYTFNNQATFQNSSFNGGTFTFNDQTNQSTQHPQIQNSSFSGSATTLKGFATFEQAFNNSNHQLTIQNASFNNATFNNTGKITIEKDASFNNTSFNTPVDTNNMTISGGVTLSGKNDLKNGATLDFGSSKITLTQGTTFNLTSLGSEKSVTILNSRGGITYNHLLNHAINSLTNALKTNESSSKPQSFAQGLWDMITYNGVTGQLLNENAATSKPTDSSPSKSSTNSTQVYQVGYKIGDTIYKLQETFSHNSIIIQALESGTYTPPPVINGSKFDLSASNYINADMPWYNHKYYIPKSQNFTESGTYYLPSVQIWGSYTNSFKQTFSASNSNLVIGYNATWTDHNVSSSDTVAFGDTSGSALNGHCGPWPYYQCTGTTNGTYSAYHVYITANLRSGNRIGTGGAANLIFNGVDSINIANATITQHNAGAYSSSMTFSTQNMDNSQNLNGLNSNGKLLVYGTTFTNQAKDGKFIFNAGQATFENTNFNGGSYQFSGDSLNFSNNNQFNSGSFEIGAKNTIFNNANFNNSTSFNFNNSSATTSFVGDFTNANSNLQIAGNAVFGNSTNGSQNTANFNNTGSVNIAGNATFDNVVFNSPTNTSVKGKVTLNNITLKNLNAPLSFGDGTIVFSAHSVINIGEAITNGNPITLVSSSKAIEYNDAFSKNLWQLINYQGHGASSEKLVSSAGNGVYDVVYSFNNQTYNFQEVFSPNSISIRRLGVGMVFDYVDMEKSDRLYYQNALGFMTYMPNSYNNNLGNLNNTIYYYDNSIDFYASGKTLFTKAEFSQTFTGQNSAIVFGAKNIWTSVSDAPQSNVIIRFGDNKGAGSNDASGHCWNLQCIGFITGHYEAQKIYITGSIESGNRISSGGARALILTGFKAFF

SEQ ID NO: 8994 - protein, 192 aa, Helicobacter pylori
  misc_feature (B) LOCATION 1...192
  hypothetical: YES
MLSFISAFDKRGVSIRLLTALLLLFSLGLAKDLEIQTFVAKYLSKNQKIQALQEQIDALDSQEKVVSKWDNPILYLGYNNANVSDFFRLDSTLMQNMSLGLSQKVDLNGKKLTQSKMINLEKQKKILELKKTKQQLVINLMINGIENYKNQQEIELLNTAIKNLENTLYQANHSSSPDLIEIDKLENLKIAN

SEQ ID NO: 8995 - protein, 217 aa, Helicobacter pylori
  misc_feature (B) LOCATION 1...217
  hypothetical: YES
KNDLVVALSSSHYSMGELTFKENEILSIAPKNFEFNNEQELHNISATNYDIAIARLDEEKAQKDITLAKKSFLEDINVTGVYYFRSKQYYNYDMFSVALSIPLPLYGKQAKLVEQKKKESLAFKSEVENAKNKTRHLALKLLKKLETLQKNLESINKIIKQNEKIAQIYALDLKTNGDYNAYYNALNDKITIQITQLETLSALNSAYLSLQNLKGLE

SEQ ID NO: 8996 - protein, 222 aa, Helicobacter pylori
  misc_feature (B) LOCATION 1...222
  hypothetical: YES
TGHGRLGWILNPKKAKFIALKQAWIYERMLSFISAFDKRGVSIRLLTALLLLFSLGLAKDLEIQTFVAKYLSKNQKIQALQEQIDALDSQEKVVSKWDNPILYLGYNNANVSDFFRLDSTLMQNMSLGLSQKVDLNGKKLTQSKMINLEKQKKILELKKTKQQLVINLMINGIENYKNQQEIELLNTAIKNLENTLYQANHSSSPDLIAIAKLEILKSQLEI

SEQ ID NO: 8997 - protein, 412 aa, Helicobacter pylori
  misc_feature (B) LOCATION 1...412
  hypothetical: YES
MLSFISAFDKRGVSIRLLTALLLLFSLGLAKDLEIQTFVAKYLSKNQKIQALQEQIDALDSQEKVVSKWDNPILYLGYNNANVSDFFRLDSTLMQNMSLGLSQKVDLNGKKLTQSKMINLEKQKKILELKKTKQQLVINLMINGIENYKNQQEIELLNTAIKNLENTLYQANHSSSPDLIAIAKLEILKSLLEIQKNDLEVALSSSHYSMGELTFKENEILSIAPKNFEFNNEQELHNISATNYDIAIARLDEEKAQKDITLAKKSFLEDINVTGVYYFRSKQYYNYDMFSVALSIPLPLYGKQAKLVEQKKKESLAFKSEVENAKNKTRHLALKLLKKLETLQKNLESINKIIKQNEKIAQIYALDLKTNGDYNAYYNALNDKITIQITQLETLSALNSAYLSLQNLKGLE

SEQ ID NO: 8998 - protein, 125 aa, Helicobacter pylori
  misc_feature (B) LOCATION 1...125
  hypothetical: YES
MKKLAALFLVSALGVMSLNAWEQTLKANDLEVKIKSVGNPIKGDNTFVLSPTLKGKALEKAIVRVQFMMPEMPGMPAMKEMAQVSEKNGLYEAKTNLSMNGTWQVRVDIKSKEGQVYRTKTSLDL

SEQ ID NO: 8999 - protein, 172 aa, Helicobacter pylori
  misc_feature (B) LOCATION 1...172
  hypothetical: YES
KNRHKLLYLLLKNLNFLKTISTIFTQKRVIIRSQQGFSCYLNLKVKTMKKLAALFLVSALGVMSLNAWEQTLKANDLEVKIKSVGNPIKGDNTFVLSPTLKGKALEKAIVRVQFMMPEMPGMPAMKEMAQVSEKNGLYEAKTNLSMNGTWQVRVDIKSKEGQVYRTKTSLDL

SEQ ID NO: 9000 - protein, 74 aa, Helicobacter pylori
  misc_feature (B) LOCATION 1...74
  hypothetical: YES
CLFVLTKSQRIRMKRLLLLALALFFSLSCTNAQEIKETQETKKTKETKSQTRFNISTTKVIEKEFSQSRRYYAL

SEQ ID NO: 9001 - protein, 245 aa, Helicobacter pylori
  misc_feature (B) LOCATION 1...245
  hypothetical: YES
GHRKRIFSKPALLRALEPNEALIFSQTLRFDGYVEKLYANKTYTPIKKGDRLLSVYSPELAGVQSELLSSLKFNQQVGAIKEKLKLLGLENFSIEKIISSHKVQNEITIYSRFNGVIFKKSPDLNEGSFIKKGQELFKIIDLSRLWALVKVNQEDLEFLKNTHQAILFVEGVKGKQAITLENINPIINAQDKMLEARFNVPNLKLLYYPNMFAQVEIFHKPQKMKILPKEAVLIKGGKAIVFKKD

SEQ ID NO: 9002 - protein, 246 aa, Helicobacter pylori
  misc_feature (B) LOCATION 1...246
  hypothetical: YES
GHRKRIFSKPALLRALEPNEALIFSQTLRFDGYVEKLYANKTYTPIKKGDRLLSVYSPELAGVQSELLSSLKFNQQVGAIKEKLKLLGLENFSIEKIISSHKVQNEITIYSRFNGVIFKKSPDLNEGSFIKKGQELFKIIDLSRLWALVKVNQEDLEFLKNTHQAILFVEGVKGKQAITLENINPIINAQDKMLEARFNVPNLKLLYYPNMFAQVEIFHKPQKMKILPKEAVLIKGGKAIVFKKDD

SEQ ID NO: 9003 - protein, 341 aa, Helicobacter pylori
  misc_feature (B) LOCATION 1...341
  hypothetical: YES
MKRLLLLALALFFSLSCTNAQEIKETQETKKTKETKSQTRFNISTTKVIEKEFSQSRRYYALLEPNEALIFSQTLRFDGYVEKLYANKTYTPIKKGDRLLSVYSPELAGVQSELLSSLKFNQQVGAIKEKLKLLGLENFSIEKIISSHKVQNEITIYSRFNGVIFKKSPDLNEGSFIKKGQELFKIIDLSRLWALVKVNQEDLEFLKNTHQAILFVEGVKGKQAITLENINPIINAQDKMLEARFNVPNLKLLYYPNMFAQVEIFHKPQKMKILPKEAVLIKGGKAIVFKKDDFGLSPLEIKAVRLSDGSYEILEGLKAGEEVANNALFVLDADAQNNGDY

SEQ ID NO: 9004 - protein, 120 aa, Helicobacter pylori
  misc_feature (B) LOCATION 1...120
  hypothetical: YES
MGVAVVLFLTLILLFLVLRDFGLASPKQKILAFLIVGIIGASISVYTYKQNQQNQQEIALQRAFLRGETLLCKGIKVNNQTFNLVSGTLSFLGKKQTPMKDVLVDLDSCQTLQKDPLIQP

SEQ ID NO: 9005 - protein, 141 aa, Helicobacter pylori
  misc_feature (B) LOCATION 1...141
  hypothetical: YES
KRLCDRLWSGGYYLSVERRNVMGVAVVLFLTLILLFLVLRDFGLASPKQKILAFLIVGIIGASISVYTYKQNQQNQQEIALQRAFLRGETLLCKGIKVNNQTFNLVSGTLSFLGKKQTPMKDVLVDLDSCQTLQKDPLIQP

SEQ ID NO: 9006 - protein, 69 aa, Helicobacter pylori
  misc_feature (B) LOCATION 1...69
  hypothetical: YES
NTGFSNLLNNKGYYMFSLSYVSKKFLSVLLLISLFLSACKSNNKDKLDENLLSSGTPSSPEIFEQREHR

SEQ ID NO: 9007 - protein, 126 aa, Helicobacter pylori
  misc_feature (B) LOCATION 1...126
  hypothetical: YES
GSKMSKNCATILKSILVLTYVNISYSKEHNFKVGDKDKNDEKEIKMSTEELAQIYAVQSTPTIVLSDKTGKTIYELPGYMPSVQFLAVLEFIGDGKYQDTKNDEDLTKKLKAYIKYKTNLSKSKSS

SEQ ID NO: 9008 - protein, 223 aa, Helicobacter pylori
  misc_feature (B) LOCATION 1...223
  hypothetical: YES
MFSLSYVSKKFLSVLLLISLFLSACKSNNKDKLDENLLSSGTQSSKELNDKRDNIDKKSYAGLEDVFLDNKSISPNDKYMLLVFGRNGCSYCERLKKDLKNVKELRNYIKEHFSAYYVNISYSKEHNFKVGDKDKNDEKEIKMSTEELAQIYAVQSTPTIVLSDKTGKTIYELPGYMPSVQFLAVLEFIGDGKYQDTKNDEDLTKKLKAYIKYKTNLSKSKSS

SEQ ID NO: 9009 - protein, 116 aa, Helicobacter pylori
  misc_feature (B) LOCATION 1...116
  hypothetical: YES
LMKSKITHFIVISFVLSVLSACKDEPKKSSQSHQNNTKTTQNNQINQPNKDIKKIEHEEEDEKVTKEVNDLINNENKIDEINNEENADPSQKRTNNVLQRATNHQDNLSSPLNRKY

SEQ ID NO: 9010 - protein, 116 aa, Helicobacter pylori
  misc_feature (B) LOCATION 1...116
  hypothetical: YES
LMKSKITHFIDIYLVKSVLSARKDEPKKLSQSHQNNTKTTQNNQINQPNKDIKKIEHEEEDEKVTKEVNDLINNENKIDEINNEENADPSQKRTNNVLQRATNHQDNLSSPLNRKY

SEQ ID NO: 9011 - protein, 66 aa, Helicobacter pylori
  misc_feature (B) LOCATION 1...66
  hypothetical: YES
LSGELRLSWWLVARCKTLFVLFCEGSAFSSLLISSILFSLLIRSFTSLVTFSSSSSCSIFFISLLG

SEQ ID NO: 9012 - protein, 69 aa, Helicobacter pylori
  misc_feature (B) LOCATION 1...69
  hypothetical: YES
YFLLSGELRLSWWLVARCKTLFVLFCEGSAFSSLLISSILFSLLIRSFTSLVTFSSSSSCSIFFISLLG

SEQ ID NO: 9013 - protein, 89 aa, Helicobacter pylori
  misc_feature (B) LOCATION 1...89
  hypothetical: YES
LVVSGSLQNIVRSFLRRISVFFIIDFINFIFVIDQIIHFFGDFFIFFFMLNLFYILIRLIDLIVLSGFSVVLVRLGRFFRLIFAGAQHA

SEQ ID NO: 9014 - protein, 89 aa, Helicobacter pylori
  misc_feature (B) LOCATION 1...89
  hypothetical: YES
LVVSGSLQNIVRSFLRRISVFFIIDFINFIFVIDQIIHFFGDFFIFFFMLNLFYILIRLIDLIVLSGFSVVLVRLGXFFRLIFACAQHA

SEQ ID NO: 9015 - protein, 136 aa, Helicobacter pylori
  misc_feature (B) LOCATION 1...136
  hypothetical: YES
KKFHTLILPVEWGTEIVLVVSGSLQNIVRSFLRRISVFFIIDFINFIFVIDQIIHFFGDFFIFFFMLNLFYILIRLIDLIVLSGFSVVLVRLGQFFRLIFACAQHAFNKVDIDKMSDFRFHQLSFFKSVYNLFILS

SEQ ID NO: 9016 - protein, 308 aa, Helicobacter pylori
  misc_feature (B) LOCATION 1...308
  hypothetical: YES
MPQNQLVITIIDESGSKQLKFSKNLKRNLIISVVILLLIVGLGVGFLKFLIAKMDTMTSERNAVLRDFRGLYQKNYALAKEIKNKREELFIVGQKIRGLESLIEIKKGANGGGHLYDEVDLENLSLNQKHLALMLIPNGMPLKTYSAIKPTKERNHPIKKIKGVESGIDFIAPLNTPVYASADGIVDFVKTRSNAGYGNLVRIEHAFGFSSIYTHLDHVNVQPKSFIQKGQLIGYSGKSGNSGGEKLHYEVRFLGKILDAEKFLAWDLDHFQSALEENKFIEWKNLFWVLEDIVQLQEHVDKDTLKGQ

SEQ ID NO: 9017 - protein, 308 aa, Helicobacter pylori; identical to SEQ ID NO: 9016
  misc_feature (B) LOCATION 1...308
  hypothetical: YES

SEQ ID NO: 9018 - protein, 309 aa, Helicobacter pylori
  misc_feature (B) LOCATION 1...309
  hypothetical: YES
LMPQNQLVITIIDESGSKQLKFSKNLKRNLIISVVILLLIVGLGVGFLKFLIAKMDTMTSERNAVLRDFRGLYQKNYALAKEIKNKREELFIVGQKIRGLESLIEIKKGANGGGHLYDEVDLENLSLNQKHLALMLIPNGMPLKTYSAIKPTKERNHPIKKIKGVESGIDFIAPLNTPVYASADGIVDFVKTRSNAGYGNLVRIEHAFGFSSIYTHLDHVNVQPKSFIQKGQLIGYSGKSGNSGGEKLHYEVRFLGKILDAEKFLAWDLDHFQSALEENKFIEWKNLFWVLEDIVQLQEHVDKDTLKGQ

SEQ ID NO: 9019 - protein, 316 aa, Helicobacter pylori
  misc_feature (B) LOCATION 1...316
  hypothetical: YES
TLSKEEGLMPQNQLVITIIDESGSKQLKFSKNLKRNLIISVVILLLIVGLGVGFLKFLIAKMDTMTSERNAVLRDFRGLYQKNYALAKEIKNKREELFIVGQKIRGLESLIEIKKGANGGGHLYDEVDLENLSLNQKHLALMLIPNGMPLKTYSAIKPTKERNHPIKKIKGVESGIDFIAPLNTPVYASADGIVDFVKTRSNAGYGNLVRIEHAFGFSSIYTHLDHVNVQPKSFIQKGQLIGYSGKSGNSGGEKLHYEVRFLGKILDAEKFLAWDLDHFQSALEENKFIEWKNLFWVLEDIVQLQEHVDKDTLKGQ

SEQ ID NO: 9020 - protein, 256 aa, Helicobacter pylori
  misc_feature (B) LOCATION 1...256
  hypothetical: YES
MLGSVKKAVFRVLCLGALCLCGGLMAEQDPKELIFSGITIYTDKNFTRAKKYFEKACKSNDADGCAILREVYSSGKAIARENARESIEKALEHTATAKVCKLNDAEKCKDLAEFYFNVNDLKNALEYYSKSCKLNNVEGCMLSATFYNDMIKGLKKDKKDLEYYSKACELNNGGGCSKLGGDYFFGEGVTKDFKKAFEYSAKACELNDAKGCYALAAFYNEGKGVAKDEKQTTENLEKSCKLGLKEACDILKEQKQ

SEQ ID NO: 9021 - protein, 258 aa, Helicobacter pylori
  misc_feature (B) LOCATION 1...258
  hypothetical: YES
VSCWGASKKRFLGFCVWGRCVYAGGLMAEQDPKELIFSGITIYTDKNFTRAKKYFEKACKSNDADGCAILREVYSSGKAIARENARESIEKALEHTATAKVCKLNDAEKCKDLAEFYFNVNDLKNALEYYSKSCKLNNVEGCMLSATFYNDMIKGLKKDKKDLEYYSKACELNNGGGCSKLGGDYFFGEGVTKDFKKAFEYSAKACELNDAKGCYALAAFYNEGKGVAKDEKQTTENLEKSCKLGLKEACDILKEQKQ

SEQ ID NO: 9022 - protein, 275 aa, Helicobacter pylori
  misc_feature (B) LOCATION 1...275
  hypothetical: YES
VSILVIIEPYTFYKREESVMLGSVKKAVFRVLCLGALCLCGGLMAEQDPKELIFSGITIYTDKNFTRAKKYFEKACKSNDADGCAILREVYSSGKAIARENARESIEKALEHTATAKVCKLNDAEKCKDLAEFYFNVNDLKNALEYYSKSCKLNNVEGCMLSATFYNDMIKGLKKDKKDLEYYSKACELNNGGGCSKLGGDYFFGEGVTKDFKKAFEYSAKACELNDAKGCYALAAFYNEGKGVAKDEKQTTENLEKSCKLGLKEACDILKEQKQ

SEQ ID NO: 9023 - protein, 275 aa, Helicobacter pylori; identical to SEQ ID NO: 9022
  misc_feature (B) LOCATION 1...275
  hypothetical: YES

SEQ ID NO: 9024 - protein, 118 aa, Helicobacter pylori
  misc_feature (B) LOCATION 1...118
  hypothetical: YES
MKKSLCLSFFLTFSNPLQALVIELLEEIKTSPHKGTFKAKVLDSKEPRQVLGVYNISPHKKLTLTITHISTAIVYQPLDEKLSLETTLSPNRPTIPRNTQIVFSSKELKEPHSNPIPS

SEQ ID NO: 9025 - protein, 122 aa, Helicobacter pylori
  misc_feature (B) LOCATION 1...122
  hypothetical: YES
KGISMKKSLCLSFFLTFSNPLQALVIELLEEIKTSPHKGTFKAKVLDSKEPRQVLGVYNISPHKKLTLTITHISTAIVYQPLDEKLSLETTLSPNRPTIPRNTQIVFSSKELKEPHSNPIPS

SEQ ID NO: 9026 - protein, 357 aa, Helicobacter pylori
  misc_feature (B) LOCATION 1...357
  hypothetical: YES
MQKPQNKPSSSQQSPQNFSYPESKLGSKNSKNSLLQPLVTPSKVSPTNEVKTPTNDANPPLKHSSQDQENNLFVAPPTEKTLPNNTSSADASENNESNENRDNVEKQAIRDPNIKEFACGKWVYDDENLQAYRPSILKRVDKDKEITTDITPCDYSTAENKSGKIITPYTKISVHKTEPLEDPQTFEAKNNFAILQARSSTEKCKRARARKDGTTRQCYLIEEPLKQAWESEYEITTQLVKAIYERPKQDDQVEPTFYETSELAYSSTRKSEITRNELNLNEKFMEFVEVYEGHYLNDIIKESSEYKEWVKNHVRFKEGVCMALEIEEQPRAKSTPLSIENSRVVCVKKGNYLFNEV

SEQ ID NO: 9027 - protein, 382 aa, Helicobacter pylori
  misc_feature (B) LOCATION 1...382
  hypothetical: YES
KHPNRFFFKRIERTALKPNTFLNAPMQKPQNKPSSSQQSPQNFSYPESKLGSKNSKNSLLQPLVTPSKVSPTNEVKTPTNDANPPLKHSSQDQENNLFVAPPTEKTLPNNTSSADASENNESNENRDNVEKQAIRDPNIKEFACGKWVYDDENLQAYRPSILKRVDKDKEITTDITPCDYSTAENKSGKIITPYTKISVHKTEPLEDPQTFEAKNNFAILQARSSTEKCKRARARKDGTTRQCYLIEEPLKQAWESEYEITTQLVKAIYERPKQDDQVEPTFYETSELAYSSTRKSEITRNELNLNEKFMEFVEVYEGHYLNDIIKESSEYKEWVKNHVRFKERVCMALKIKKQPRAKSTPLSIENSRVVCVKKGNYLFNEV

SEQ ID NO: 9028 - protein, 479 aa, Helicobacter pylori
  misc_feature (B) LOCATION 1...479
  hypothetical: YES
MKKSLCLSFFLTFSNPLQALVIELLEEIKTSPHKGTFKAKVLDSKEPRQVLGVYNISPHKKLTLTITHISTAIVYQPLDEKLSLETTLSPNRPTIPRNTQIVFSSKELKEPHSNPIPSLNAPMQKPQNKPSSSQQSPQNFSYPESKLGSKNSKNSLLQPLVTPSKVSPTNEVKTPTNDANPPLKHSSQDQENNLFVAPPTEKTLPNNTSSADASENNESNENRDNVEKQAIRDPNIKEFACGKWVYDDENLQAYRPSILKRVDKDKEITTDITPCDYSTAENKSGKIITPYTKISVHKTEPLEDPQTFEAKNNFAILQARSSTEKCKRARARKDGTTRQCYLIEEPLKQAWESEYEITTQLVKAIYERPKQDDQVEPTFYETSELAYSSTRKSEITRNELNLNEKFMEFVEVYEGHYLNDIIKESSEYKEWVKNHVRFKEGVCMALEIEEQPRAKSTPLSIENSRVVCVKKGNYLFNEV

SEQ ID NO: 9029 - protein, 479 aa, Helicobacter pylori; identical to SEQ ID NO: 9028
  misc_feature (B) LOCATION 1...479
  hypothetical: YES

SEQ ID NO: 9030 - protein, 97 aa, Helicobacter pylori
  misc_feature (B) LOCATION 1...97
  hypothetical: YES
MGQTKEIITTLLPLLVLFLIFYFLIVRPQRQQQKKHKEMIEGLTKGDKIVTQGGLIVEVLKAEANFFSVKLNDDTTAKLSKNYVAFKLDEETTPNNN

SEQ ID NO: 9031 - protein, 100 aa, Helicobacter pylori
  misc_feature (B) LOCATION 1...100
  hypothetical: YES
GNLMGQTKEIITTLLPLLVLFLIFYFLIVRPQRQQQKKHKEMIEGLTKGDKIVTQGGLIVEVLKAEANFFSVKLNDDTTAKLSKNYVAFKLDEETTPNNN

SEQ ID NO: 9032 - protein, 237 aa, Helicobacter pylori
  misc_feature (B) LOCATION 1...237
  hypothetical: YES
MKSNKKSNHLRAIYRALVIAIGLAVIIVFNYFNRKNNNARSSRRACSCFFSLTGVNLEKIGSFDTGAKLIVLNHQSLLDIIYLEAYHPSNICWIAKKELGEIPFYGHALTDTGMILIDREDKKGIVSLLKACKEKLDQNRPLVIFPEGTRGKGGEKFLPFKQGAKIIAEKFQLKIQPMVLINSIKIFNSKPLEAYKARTRLVMLESYTPDFSSPTWYEELQERMQKEYLKHYHELNA

SEQ ID NO: 9033 - protein, 242 aa, Helicobacter pylori
  misc_feature (B) LOCATION 1...242
  hypothetical: YES
DGSKKMKSNKKSNHLRAIYRALVIAIGLAVIIVFNYFNRKNNNARSSRRACSCFFPPTGVNLEKIGSFDTGAKLIVLNHQSLLDIIYLEAYHPSNICWIAKKELGEIPFYGHALTDTGMILIDREDKKGIVSLLKACKEKLDQNRPLVIFPEGTRGKGGEKFLPFKQGAKIIAEKFQLKIQPMVLINSIKIFNSKPLEAYKARTRLVMLESYTPDFSSPTWYEELQERMQKEYLKHYHELNA

SEQ ID NO: 9034 - protein, 74 aa, Helicobacter pylori
  misc_feature (B) LOCATION 1...74
  hypothetical: YES
HKRILTPTSNLHLKKLDDNTPISKEADIDYNSEQDIDVTPIMINDDIQLKTAIDSLKTWSIVDEKMDEKVPKKK

SEQ ID NO: 9035 - protein, 365 aa, Helicobacter pylori
  misc_feature (B) LOCATION 1...365
  hypothetical: YES
FFYPWCVFHPTTLVVTILFVSSWCEVGTVHRSQKIPRITARVEAFSRFSNVVTEIEKKYADKISISEIMTKAIEGLLSNLDAHSAYLNEKKFKEFQAQTEGEFGGLGITVGMRDGVLTVIAPLEGTPAYKAGVKSGDSILKINNESTLSMSIDDAVNLMRGKPKTSIQITVVRKNEPKPLVFNIVRDIIKIPSVYVKKIKDTPYLYVRVNSFDKNVTKSVLDGLKANPNIKGVVLNLRGNPGGLLNQAVGLSNLFIKEGVLVSQRGKNKEENLEYKANGQSPFIPIYLLWVLANGGSASRERDRRRGTARPQASLSFTGEKTFGKGSVSSVAPSQYMMKPLISRPRAIICRAGAPFKLRGSRLIL

SEQ ID NO: 9036 - protein, 459 aa, Helicobacter pylori
  misc_feature (B) LOCATION 1...459
  hypothetical: YES
VVLLTMTKRLFKGLLAISLAVSLHGGEVKEKKPVKPVKEDPQELAAKRVEAFSRFSNVVTEIEKKYVDKISISEIMTKAIEGLLSNLDAHSAYLNEKKFKEFQAQTEGEFGGLGITVGMRDGVLTVIAPLEGTPAYKAGVKSGDSILKINNESTLSMSIDDAVNLMRGKPKTSIQITVVRKNEPKPLVFNIVRDIIKIPSVYVKKIKDTPYLYVRVNSFDKNVTKSVLDGLKANPNIKGVVLDLRGNPGGLLNQAVGLSNLFIKEGVLVSQRGKNKEENLEYKANGRAPYTNLPVVVLVNGGSASASEIVAGALQDHKRAIIIGEKTFGKGSVQVLLPVNKDEAIKITTARYYLPSGRTIQAKGITPDIVIYPGKVPENENKFSLKEADLKHHLEQELKKLDDKTPISKEADKDKKSEEEKEVTPKMINDDIQLKTAIDSLKTWSIVDEKMDEKVPKKK

SEQ ID NO: 9037 - protein, 84 aa, Helicobacter pylori
  misc_feature (B) LOCATION 1...84
  hypothetical: YES
VNKKHRLAFLGLIVGVLFFFSACQHRLHMGYYSEVTGDYLFNYNSTIVVAYDRSDAMTSYYINVIVYELQKLGFYNVFTQANSR

SEQ ID NO: 9038 - protein, 88 aa, Helicobacter pylori
  misc_feature (B) LOCATION 1...88
  hypothetical: YES
GNVKVNKKHRLAFLGLIVGVLFFFSACQHRLHMGYYSEVTGDYLFNYNSTIVVAYDRSDAMTSYYINVIVYELQKLGFYNVFTQANSR

SEQ ID NO: 9039 - protein, 129 aa, Helicobacter pylori
  misc_feature (B) LOCATION 1...129
  hypothetical: YES
VIYVRIVRNISAVPFYQYNYQLIDQVNKPCYFLGGQFYCSQTPTDYYAINGFSEQILMSANSHFILDWYDVVLQKRVLYVDGSVSGRTCGYQMLYRDLIKSTIKRIDFNRPERYYYNLRLPLYQPCYRQ

SEQ ID NO: 9040 - protein, 143 aa, Helicobacter pylori
  misc_feature (B) LOCATION 1...143
  hypothetical: YES
CLHASEFPLDKAKNVIYVRIVRNISAVPFYQYNYQLIDQVNKPCYFLGGQFYCSQTPTDYYAINGFSEQILMSANSHFILDWYDVVLQKRVLYVDGSVSGRTCGYQMLYRDLIKSTIKRIDFNRPERYYYNLRLPLYQPCYRQ

SEQ ID NO: 9041 - protein, 219 aa, Helicobacter pylori
  misc_feature (B) LOCATION 1...219
  hypothetical: YES
VNKKHRLAFLGLIVGVLFFFSACQHRLHMGYYSEVTGDYLFNYNSTIVVAYDRSDAMTSYYINVIVYELQKLGFYNVFTQAEFPLDKAKNVIYVRIVRNISAVPFYQYNYQLIDQVNKPCYFLGGQFYCSQTPTDYYAINGFSEQILMSANSHFILDWYDVVLQKRVLYVDGSVSGRTCGYQMLYRDLIKSTIKRIDFNRPERYYYNLRLPLYQPCYRQ

SEQ ID NO: 9042 - protein, 207 aa, Helicobacter pylori
  misc_feature (B) LOCATION 1...207
  hypothetical: YES
MAYKPNKKKLKELREQPNLFSILDKGDVATNNPVEESDKANKIQEPLPYVVKTQINKASMISRDPIEWAKYLSFEKRVYKDNSKEDVNFFANGEIKESSRVYEANKEGFERRITKRYDLIDRNREFFIKEIEILTHTNSLKELKEQGLEIQLTHHNETHKKALENGNEIVKEYDHLKDIYQEVERTKDGGLVREIIPVFLALSISSF

SEQ ID NO: 9043 - protein, 438 aa, Helicobacter pylori
  misc_feature (B) LOCATION 1...438
  hypothetical: YES
MAYKPNKKKLKELREQPNLFSILDKGDVATNNPVEESDKANKIQEPLPYVVKTQINKASMISRDPIEWAKYLSFEKRVYKDNSKEDVNFFANGEIKESSRVYEANKEGFERRITKRYDLIDRNIDRNREFFIKEIEILTHTNSLKELKEQGLEIQLTHHNETHKKALENGNEIVKEYDHLKDIYQEVERTKDGGLVREIIPSISSAEYFKLYNKLPFESINNENTKLNTNDNEEVKKLEFELAKEVHILILEQQLLSATNYYSWIDKDDNANFAWKMHRLINENKLKENHLSANNANKIKQFFFNNGSILGWTKEEQSAIQENRDYSLRSALLSLEEIAQAKIELQKYYESVYVNGDGNKREIKPFKEILRDTNNFEKAYKERYDKLVSLSAAIIQAKEGGNERPNSSANNNNPIKNTIETNTSNNIIQNNDNIIIQI

SEQ ID NO: 9044 - protein, 68 aa, Helicobacter pylori
  misc_feature (B) LOCATION 1...68
  hypothetical: YES
WVKKPLEYKVAVSGVNVRAFPSTKGKIIGSLIKNKSVKVLEIQNDWAEIEFSHETKGYVFLKLLKKAE

SEQ ID NO: 9045 - protein, 165 aa, Helicobacter pylori
  misc_feature (B) LOCATION 1...165
  hypothetical: YES
KALMVGMKTGAWTGLKLFAQPLLVVLAFMLLYALAHAVLGFYVKKDSAPMSPNVEKSETERQNSTFSPKEEANATTTATEQNPTKDTVPPLDTATQKQEIKQEIKQEIKQEIKQEIKQEIKQEIKQETKQEQEKENKPKQNSVSPVQNDQKTPTTPLMGKKTSRV

SEQ ID NO: 9046 - protein, 215 aa, Helicobacter pylori
  misc_feature (B) LOCATION 1...215
  hypothetical: YES
MKSFLKLFAQPLLVVLAFMLLYALAHAVLGFYVKKDSAPMSPNVEKSETERQNSTFSPKEEANATTTATEQNPTKDTVPPLDTATQKQEIKQEIKQEIKQEIKQEIKQEIKQEIKQETKQEQEKENKPKQNSVSPVQNDQKTPTTPLMGKKPLEYKVAVSGVNVRAFPSTKGKIIGSLIKNKSVKVLEIQNDWAEIEFSHETKGYVFLKLLKKAE

SEQ ID NO: 9047 - protein, 222 aa, Helicobacter pylori
  misc_feature (B) LOCATION 1...222
  hypothetical: YES
MVGMKTEMKSFLKLFAQPLLVVLAFMLLYALAHAVLGFYVKKDSAPMSPNVEKSETERQNSTFSPKEEANATTTATEQNPTKDTVPPLDTATQKQEIKQEIKQEIKQEIKQEIKQEIKQEIKQETKQEQEKENKPKQNSVSPVQNDQKTPTTPLMGKKPLEYKVAVSGVNVRAFPSTKGKIIGSLIKNKSVKVLEIQNDWAEIEFSHETKGYVFLKLLKKAE

SEQ ID NO: 9048 - protein, 233 aa, Helicobacter pylori
  misc_feature (B) LOCATION 1...233
  hypothetical: YES
LSLMXVLNAKECVXPITRSVKYHQQSAEIRALQLQSYKMAKMALDNNLKLVKDKKPAVILDLDETVLNTFDYAGYLVKNCIKYTPETWDKFEKEGSLTLIPGALDFLEYANSKGVKIFYISNRTQKNKAFTLKTLKSFKLPQVSEESVLLKEKGKPKAVRRELVAKDYAIVLQVGDTLHDFDAIFAKDAKNSQEQQAKVLQNAQKFGTEWIILPNSLYGTWEDGPIKAWQNKK

SEQ ID NO: 9049 - protein, 245 aa, Helicobacter pylori
  misc_feature (B) LOCATION 1...245
  hypothetical: YES
MIKKTLASVLLGLSLMSVLNAKECVSPITRSVKYHQQSAEIRALQLQSYKMAKMALDNNLKLVKDKKPAVILDLDETVLNTFDYAGYLVKNCIKYTPETWDKFEKEGSLTLIPGALDFLEYANSKGVKIFYISNRTQKNKAFTLKTLKSFKLPQVSEESVLLKEKGKPKAVRRELVAKDYAIVLQVGDTLHDFDAIFAKDAKNSQEQQAKVLQNAQKFGTEWIILPNSLYGTWEDGPIKAWQNKK

SEQ ID NO: 9050 - protein, 249 aa, Helicobacter pylori
  misc_feature (B) LOCATION 1...249
  hypothetical: YES
VGVVMIKKTLASVLLGLSLMSVLNAKECVSPITRSVKYHQQSAEIRALQLQSYKMAKMALDNNLKLVKDKKPAVILDLDETVLNTFDYAGYLVKNCIKYTPETWDKFEKEGSLTLIPGALDFLEYANSKGVKIFYISNRTQKNKAFTLKTLKSFKLPQVSEESVLLKEKGKPKAVRRELVAKDYAIVLQVGDTLHDFDAIFAKDAKNSQEQQAKVLQNAQKFGTEWIILPNSLYGTWEDGPIKAWQNKK

SEQ ID NO: 9051 - protein, 222 aa, Helicobacter pylori
  misc_feature (B) LOCATION 1...222
  hypothetical: YES
MKKKAKVFWCCFKMIRWLYLAVFFLLSVSDAKEIAMQRFDKQNHKIFEILADKVSAKDNVITASGNAILLNYDVYILADKVRYDTKTKEALLEGNIKVYRGEGLLVKTDYVKLSLNEKYEIIFPFYVQDSVSGIWVSADIASGKDQKYKIKNMSASGCSIDNPIWHVNATSGSFNMQKSHLSMWNPKIYVGDIPVLYLPYIFMSTSNKRTTGFLYPEFGTST

SEQ ID NO: 9052 - protein, 276 aa, Helicobacter pylori
  misc_feature (B) LOCATION 1...276
  hypothetical: YES
MKKKAKVFWCCFKMIRWLYLAVFFLLSVSDAKEIAMQRFDKQNHKIFEILADKVSAKDNVITASGNAILLNYDVYILADKVRYDTKTKEALLEGNIKVYRGEGLLVKTDYVKLSLNEKYEIIFPFYVQDSVSGIWVSADIASGKDQKYKIKNMSASGCSIDNPIWHVNATSGSFNMQKSHLSMWNPKIYVGDIPVLYLPYIFMSTSNKRTTGFLYPEFGTSNLDGFIYLQPFYLAPKNSWDMTFTPQIRYKRGFGLNFEARYINSKTQVFIQCALF

SEQ ID NO: 9053 - protein, 288 aa, Helicobacter pylori
  misc_feature (B) LOCATION 1...288
  hypothetical: YES
KSWFFYAPFYGLWCLKTPIIGHGMKKKAKVFWCCFKMIRWLYLAVFFLLSVSDAKEIAMQRFDKQNHKIFEILADKVSAKDNVITASGNAILLNYDVYILADKVRYDTKTKEALLEGNIKVYRGEGLLVKTDYVKLSLNEKYEIIFPFYVQDSVSGIWVSADIASGKDQKYKIKNMSASGCSIDNPIWHVNATSGSFNMQKSHLSMWNPKIYVGDIPVLYLPYIFMSTSNKRTTGFLYPEFGTSHLDGFIYLQPFYLAPKNSWDMTFTPQIRYKRGFGLNFEARYINP

SEQ ID NO: 9054 - protein, 288 aa, Helicobacter pylori
  misc_feature (B) LOCATION 1...288
  hypothetical: YES
LWCLKTPIIGHGMKKKAKVFWCCFKMIRWLYLAVFFLLSVSDAKEIAMQRFDKQNHKIFEILADKVSAKDNVITASGNAILLNYDVYILADKVRYDTKTKEALLEGNIKVYRGEGLLVKTDYVKLSLNEKYEIIFPFYVQDSVSGIWVSADIASGKDQKYKIKNMSASGCSIDNPIWHVNATSGSFNMQKSHLSMWNPKIYVGDIPVLYLPYIFMSTSNKRTTGFLYPEFGTSNLDGFIYLQPFYLAPKNSWDMTFTPQIRYKRGFGLNFEARYINSKTQVFIQCALF

SEQ ID NO: 9055 - protein, 79 aa, Helicobacter pylori
  misc_feature (B) LOCATION 1...79
  hypothetical: YES
MKKVIVALGVLAFANVLMATDVKALVKGCAACHGVKFEKKALGKSKIVNMMSEKEIEEDLMAFKSGANKNPVMTRKLKN

SEQ ID NO: 9056 - protein, 96 aa, Helicobacter pylori
  misc_feature (B) LOCATION 1...96
  hypothetical: YES
MKKVIVALGVLAFANVLMATDVKALVKGCAACHGVKFEKKALGKSKIVNMMSEKEIEEDLMAFKSGANKNPVMTAQAKKLSDEDIKALAKYIPTLK

SEQ ID NO: 9057 - protein, 101 aa, Helicobacter pylori
  misc_feature (B) LOCATION 1...101
  hypothetical: YES
VRRQTMKKVIVALGVLAFANVLMATDVKALVKGCAACHGVKFEKKALGKSKIVNMMSEKEIEEDLMAFKSGANKNPVMTAQAKKLSDEDIKALAIYIPTLK

SEQ ID NO: 9058 - protein, 288 aa, Helicobacter pylori
  misc_feature (B) LOCATION 1...288
  hypothetical: YES
VVIMILVCFLACSQESFIKMQKKAQEQENDGSKRPSYVDSDYEVFSETIFLQNMVYQPIEERNAFFQLTKDEDNSFNPENSVILLNEPSDNSEKNLLSYPNDPNNNEDNANNSQKNPFLYKPKRKTKNPKLIEYSQQDFYPLKNGDIIMSKEGDQWLIEIQSKALKRFLKDQNDKDRQIQTFTFNDTKTQIAQIKGKISSYVYTTNNGSLSLRPFYESFLLEKKSDNVYTIENKALDTMEISKCQMVLKKHSTDKLDSQHKAISIDLDFKKERFKSDTELFLECLKES

SEQ ID NO: 9059 - protein, 296 aa, Helicobacter pylori
  misc_feature (B) LOCATION 1...296
  hypothetical: YES
LFLVKKIGVVIMILVCFLACSQESFIKMQKKAQEQENDGSKRPSYVDSDYEVFSETIFLQNMVYQPIEERNAFFQLTKDEDNSFNPENSVILLNEPSDNSEKNLLSYPNDPNNNEDNANNSQKNPFLYKPKRKTKNPKLIEYSQQDFYPLKNGDIIMSKEGDQWLIEIQSKALKRFLKDQNDKDRQIQTFTFNDTKTQIAQIKGKISSYVYTTNNGSLSLRPFYESFLLEKKSDNVYTIENKALDTMEISKCQMVLKKHSTDKLDSQHKAISIDLDFKKERFKSDTELFLECLKES

SEQ ID NO: 9060 - protein, 303 aa, Helicobacter pylori
  misc_feature (B) LOCATION 1...303
  hypothetical: YES
SLNKGLALFLVKKIGVVIMILVCFLACSQESFIKMQKKAQEQENDGSKRPSYVDSDYEVFSETIFLQNMVYQPIEERNAFFQLTKDEDNSFNPENSVILLNEPSDNSEKNLLSYPNDPNNNEDNANNSQKNPFLYKPKRKTKNPKLIEYSQQDFYPLKNGDIIMSKEGDQWLIEIQSKALKRFLKDQNDKDRQIQTFTFNDTKTQIAQIKGKISSYVYTTNNGSLSLRPFYESFLLEKKSDNVYTIENKALDTMEISKCQMVLKKHSTDKLDSQHKAISIDLDFKKERFKSDTELFLECLKES

SEQ ID NO: 9061 - protein, 205 aa, Helicobacter pylori
  misc_feature (B) LOCATION 1...205
  hypothetical: YES
MRYFRSAFLLFFMTLFFVSCSKHPFSKQTPKTKERIRQEEANKKREETLNALRQFRLIYINTPVFRFYDYGTIKTDKDHNTEVTLYKLSQKVGDIYMTKRSICFSQKCSAKWIAARDLFGKVSYGDLFDDIVLGRDIFKGLGKRHLTPEYVIQRFQKSGEIILYERKNGLISFQNLTQKIAIRIEPYEPSLQDLEDNENADSELQ

SEQ ID NO: 9062 - protein, 205 aa, Helicobacter pylori; identical to SEQ ID NO: 9061
  misc_feature (B) LOCATION 1...205
  hypothetical: YES

SEQ ID NO: 9063 - protein, 217 aa, Helicobacter pylori
  misc_feature (B) LOCATION 1...217
  hypothetical: YES
ADREDKLSHSIIMRYFRSAFLLFFMTLFFVSCSKHPFSKQTPKTKERIRQEEANKKREETLNALRQFRLIYINTPVFRFYDYGTIKTDKDHNTEVTLYKLSQKVGDIYMTKRSICFSQKCSAKWIAARDLFGKVSYGDLFDDIVLGRDIFKGLGKRHLTPEYVIQRFQKSGEIILYERKNGLISFQNLTQKIAIRIEPYEPSLQDLEDNENADSELQ

SEQ ID NO: 9064 - protein, 105 aa, Helicobacter pylori
  misc_feature (B) LOCATION 1...105
  hypothetical: YES
VNAVGMGVAPESTISPSQALALAKRAAIVDGYRQLGEKMYGIRVNAQDTVKDMVLQNSVIKTRVNALIRNAEITETIYKDGLCQVSMELKLDGRIWYRILSGSRG

SEQ ID NO: 9065 - protein, 201 aa, Helicobacter pylori
  misc_feature (B) LOCATION 1...201
  hypothetical: YES
MRLHTAFFGINSLLVATLLISGCSLFKKRNTNAQLIPPSANGLQAPIYPPTNFTPRKSIQPLPSPRLENNDQPIISSNPTNAIPNTPILTPNNVIELNAVGMGVAPESTISPSQALALAKRAAIVDGYRQLGEKMYGIRVNAQDTVKDMVLQNSVIKTRVNALIRNAEITETIYKDGLCQVSMELKLDGRIWYRILSGSRG

SEQ ID NO: 9066 - protein, 91 aa, Helicobacter pylori
  misc_feature (B) LOCATION 1...91
  hypothetical: YES
GVGYPKIALGYQLQILGAKIDKYQFNIQSAVGSVGLFFNAAKNFGLSIEARGGIPFYFIQSRFSKAFGTPRLNIYSVGITFTFYDFTRFLG

SEQ ID NO: 9067 - protein, 205 aa, Helicobacter pylori
  misc_feature (B) LOCATION 1...205
  hypothetical: YES
LIFRFFLILSLLKGVLLAKKDWNFFKPLEPTKKYFGSFKIGYLYQHAETTKRFPIRPKNRPPILMDKIYHDASLGFDAGYVLKKKALLGGYLDAGMGDSYFMSAGLVAGVRLFKGWVIPKIALGYQLQILGAKIDKYQFNIQSAVGSVGLFFNAAKNFGLSIEARGGIPFYFIQSRFSKAFGTPRLNIYSVGITFTFYDFTRFLG

SEQ ID NO: 9068 - protein, 116 aa, Helicobacter pylori
  misc_feature (B) LOCATION 1...116
  hypothetical: YES
MAIAIKDLLSAYKVVLPLDKISMPSSADLKLTLQFLKNTAPLFSVQGSVNLQEGTFSLYNIPLYTQSAQINLDIAQEYQYIYIDTIHTRYANMXDLDAKIALDLGQKNLSXXXLGP

SEQ ID NO: 9069 - protein, 978 aa, Helicobacter pylori
  misc_feature (B) LOCATION 1...978
  hypothetical: YES
MKKRKHVSKKVFNVIILFVAVFTLLVVIHKTLSNGIHIQNLKIGKLGISELYLKLNNKLSLEVERVDLSSFFHQKPTKKRLEVSDLIKNIRYGIWAVSYFEKLKVKEIILDDKNKANIFFDGNKYELEFPGIKGEFSLEDDKNIKLKIINLLFKDVKVQVDGNAHYSPKARKMAFNLIVKPLVEPSAAIYLQGLTDLKTIELKINTSPMKSLAFLKPLFQRQSQKNLKTWIFDKIQFASFKIDNALIKANFTPSEFIPSLLENSVVKATLIKPSVVFNDGLSPIKMDKTELIFKNKQLLIQPQKITYETMELTGSYATFSNLLEAPKLEVFLKTTPNYYGDSIKDLLSAYKVVLPLDKISMPSSADLKLTLQFLKNTAPLFSVQGSVNLQEGTFSLYNIPLYTQSAQINLDIAQEYQYIYIDTIHTRYANMLDLDAKIALDLGQKNLSLDSLVHKIQVNTNNNINMRSYDPNNTQEDPQTNFTLDLKSLHSIIQEGENSEVFRRKIIDTIKAQSEDKFTKDVFYATGDTLKSLSLSFDFSNPDHIQWSVPQLLLEGEFKDNAYTFKIKDLKKIKPYSPIMDYIALKDGSLEVSTSDFVNIDFFAKDLKINLPIYRSDGSHFDSFSLFGSINKDEISVYTPSKSISIKVKGDQKDITLNNIDLSIDDFLDSKMPAIAGLFSKERKEKPSSKEIQDEDVFISAKQRYEKAHKIIPISTRIHAKDVVLIYKKMPFPLENLDIVAQDDRVKIDGNYKNAMIMADLVHGALYLKAHNFSGDYINTILQKDFVEGGLFTLIGALEDQVFNGELKFQNTSLKNFALMQNMVNLINTIPSLIVFRNPHLGANGYQIKTGSVVFGITKEYLGLEKIDLVGKTLDIAGNGIIELDKNKLDLNLEVSTIKALSNVLNKIPIVGYLVLGKGGKITTNVNVKGTLDKPKTQVTLASDIIQAPFKILRRIFTPIDIIVDEVKKNIDSKRKLK

SEQ ID NO: 9070 - protein, 982 aa, Helicobacter pylori
  misc_feature (B) LOCATION 1...982
  hypothetical: YES
KRILMKKRKHVSKKVFNVIILFVAVFTLLVVIHKTLSNGIHIQNLKIGKLGISELYLKLNNKLSLEVERVDLSSFFHQKPTKKRLEVSDLIKNIRYGIWAVSYFEKLKVKEIILDDKNKANIFFDGNKYELEFPGIKGEFSLEDDKNIKLKIINLLFKDVKVQVDGNAHYSPKARKMAFNLIVKPLVEPSAAIYLQGLTDLKTIELKINTSPMKSLAFLKPLFQRQSQKNLKTWIFDKIQFASFKIDNALIKANFTPSEFIPSLLENSVVKATLIKPSVVFNDGLSPIKMDKTELIFKNKQLLIQPQKITYETMELTGSYATFSNLLEAPKLEVFLKTTPNYYGDSIKDLLSAYKVVLPLDKISMPSSADLKLTLQFLKNTAPLFSVQGSVNLQEGTFSLYNIPLYTQSAQINLDIAQEYQYIYIDTIHTRYANMLDLDAKIALDLGQKNLSLDSLVHKIQVNTNNNINMRSYDPNNTQEDPQTNFTLDLKSLHSIIQEGENSEVFRRKIIDTIKAQSEDKFTKDVFYATGDTLKSLSLSFDFSNPDHIQWSVPQLLLEGEFKDNAYTFKIKDLKKIKPYSPIMDYIALKDGSLEVSTSDFVNIDFFAKDLKINLPIYRSDGSHFDSFSLFGSINKDEISVYTPSKSISIKVKGDQKDITLNNIDLSIDDFLDSKMPAIAGLFSKERKEKPSSKEIQDEDVFISAKQRYEKAHKIIPISTRIHAKDVVLIYKKMPFPLENLDIVAQDDRVKIDGNYKNAMIMADLVHGALYLKAHNFSGDYINTILQKDFVEGGLFTLIGALEDQVFNGELKFQNTSLKNFALMQNMVNLINTIPSLIVFRNPHLGANGYQIKTGSVVFGITKEYLGLEKIDLVGKTLDIAGNGIIELDKNKLDLNLEVSTIKALSNVLNKIPIVGYLVLGKGGKITTNVNVKGTLDKPKTQVTLASDIIQAPFKILRRIFTPIDIIVDEVKKNIDSKRKLK

SEQ ID NO: 9071 - protein, 80 aa, Helicobacter pylori
  misc_feature (B) LOCATION 1...80
  hypothetical: YES
LLLNLKIYVTLCKIQGDSVLEKSFLKSKQLVLCGLGVFMLQALHFAQTLHKEILFYKMCLIGCCKIAASISRKGWIARTL

SEQ ID NO: 9072 - protein, 192 aa, Helicobacter pylori
  misc_feature (B) LOCATION 1...192
  hypothetical: YES
VLEKSFLKSKQLVLCGLGVLMLQACTCPNTSQRNSFLQDVPYWMLQNRSQYLTQGVDSSHIVDGKATEEIEKIATKRATIRVAQNIVHKLKEAYLSKSNRIKQKITNEMFIQMTKPIFDSLMNVDRLGIYINPNNEEVFALVRARSFDKDALSEGLHKMSLDDQAVSILVSKVEEIFKDSINYGDVKVPIAM

SEQ ID NO: 9073 - protein, 91 aa, Helicobacter pylori
  misc_feature (B) LOCATION 1...91
  hypothetical: YES
MASGLFENDEIKNNKARDFFYSHSSLIVFFLLLLGFGYYLGKLLFGGSSLEVYLDLRDKHERLQQEITELQSKNVRLQKRLFELRELRPRD

SEQ ID NO: 9074 - protein, 103 aa, Helicobacter pylori
  misc_feature (B) LOCATION 1...103
  hypothetical: YES
KGGFISAKSCLSMASGLFENDEIKNNKARDFFYSHSSLIVFFLLLLGFGYYLGKLLFGGSSLEVYLDLRDKHERLQQEITELQSKNVRLQKRLFELRELRPRD

SEQ ID NO: 9075 - protein, 193 aa, Helicobacter pylori
  misc_feature (B) LOCATION 1...193
  hypothetical: YES
MKEKNFWPLGIMSVLIFGLGIVVFLVVFALKNSPKNDLVYFKGHNEVDLNFNAMLKTYENFKSNYRFSVGLKPLTESPKTPILPYFSKGTHGDKKIQENLLNNALILEKSNTLYAQLQPLKPALDSPNIQVYLAFYPSQSQPRLLGTLDCKNACEPLKFDLLEGDKVGRYKILFKFVFKNKEELILEQLAFFK

SEQ ID NO: 9076 - protein, 197 aa, Helicobacter pylori
  misc_feature (B) LOCATION 1...197
  hypothetical: YES
EGKSMKEKNFWPLGIMSVLIFGLGIVVFLVVFALKNSPKNDLVYFKGHNEVDLNFNAMLKTYENFKSNYRFSVGLKPLTESPKTPILPYFSKGTHGDKKIQENLLNNALILEKSNTLYAQLQPLKPALDSPNIQVYLAFYPSQSQPRLLGTLDCKNACEPLKFDLLEGDKVGRYKILFKFVFKNKEELILEQLAFFK

SEQ ID NO: 9077 - protein, 214 aa, Helicobacter pylori
  misc_feature (B) LOCATION 1...214
  hypothetical: YES
MKEKNFWPLGIMSVLIFGLGIVVFLVVFALKNSPKNDLVYFKGHNEVDLNFNAMLKTYENFKSNYRFSVGLKPLTESPKTPILPYFSKGTHGDKKIQENLLNNALILEKSNTLYAQLQPLKPALDSPNIQVYLAFYPSQSQPRLLGTLDCKNACEPLKFDLLEGDKVGRYKILFKFVFKNKEELILEQLLFLSSMACMGISILKNAKAFFKYKI

SEQ ID NO: 9078 - protein, 305 aa, Helicobacter pylori
  misc_feature (B) LOCATION 1...305
  hypothetical: YES
MIKSWTKKWFLILFLMASCFGHLVATTGEKYFKMANQALKRGDYHRAVAFYKRSCNLRMGVGCTSLGSMYEYGDGVDQNISKAVFYYRRGCNLRNHLACASLGSMYEDGDGVQKDFPKAIYYYRRGCHLKGGVSCGSLGFMYFNGTGVKQNYAKALSFSKYACSLNYGISCNFVGYMYKSAKGVEKDLKKALANFKRGCHLKDGASCVSLGYLYEAGMDVKQNEEQALNLYKKGCSLKEGSGCHNVAVMYYTGKGAPKDLEKATSYYKKGCALGFSGSCKVLEVIGKESDNLQDDAQNDTQDSVQ

SEQ ID NO: 9079 - protein, 332 aa, Helicobacter pylori
  misc_feature (B) LOCATION 1...332
  hypothetical: YES
LYYNSQLNWGFTDLSLCELWLSFVRNEMIKSWTKKWFLILFLMASCFGHLVATTGEKYFKMANQALKRGDYHRAVAFYKRSCNLRMGVGCTSLGSMYEYGDGVDQNISKAVFYYRRGCNLRNYLACASLGSMYEDGDGVQKDFPKAIYYYRRGCHLKGGVSCGSLGFMYFNGTGVKQNYAKALSFSKYACSLNYGISCNFVGYMYKSAKGVEKDLKKALANFKRGCHLKDGASCVSLGYLYEAGMDVKQNEEQALNLYKKGCSLKEGSGCHNVAVMYYTGKGAPKDLEKATSYYKKGCALGFSGSCKVLEVIGKESDNLQDDAQNDTQDSVQ

SEQ ID NO: 9080 - protein, 268 aa, Helicobacter pylori
  misc_feature (B) LOCATION 1...268
  hypothetical: YES
MSEKERLNEVILEEENNGSGTKKVFLIVAIAIIILAVLLMVFWKSTRVAPKETFLQTDSGMQKIGNTKDEKKDDEFESLNMDSPKQEDKLDKVVDNIKKQESENSMPIQTDQAQMEMKTTEEKQESQKELKAVEPIPMSTQKESQAVAKKETPHKKPKVAPKDKEAHKDKAKHAAKEPKVKKEARKEVSKKANSKTNLTKGHYLQVGVFAHTPNKAFLQEFNQFPHKIEDRGATKRYLIGPYKSKQEALMHADEVSKKMTKPVVIEVR

SEQ ID NO: 9081 - protein, 268 aa, Helicobacter pylori; identical to SEQ ID NO: 9080
  misc_feature (B) LOCATION 1...268
  hypothetical: YES

SEQ ID NO: 9082 - protein, 275 aa, Helicobacter pylori
  misc_feature (B) LOCATION 1...275
  hypothetical: YES
PFLKGFLMSEKERLNEVILEEENNGSGTKKVFLIVAIAIIILAVLLMVFWKSTRVAPKETFLQTDSGMQKIGNTKDEKKDDEFESLNMDSPKQEDKLDKVVDNIKKQESENSMPIQTDQAQMEMKTTEEKQESQKELKAVEPIPMSTQKESQAVAKKETPHKKPKVAPKDKEAHKDKAKHAAKEPKVKKEARKEVSKKANSKTNLTKGHYLQVGVFAHTPNKAFLQEFNQFPHKIEDRGATKRYLIGPYKSKQEALMHADEVSKKMTKPVVIEVR

SEQ ID NO: 9083 - protein, 206 aa, Helicobacter pylori
  misc_feature (B) LOCATION 1...206
  hypothetical: YES
HALYSPIKIAFEKALKNAKESVFIASSYFIPGKKIMKIFKNQISKGIELNILTNSLSSTDAIVVYGAWERYRNKLVRMGANVYEIRNDFFNRQIKGRFSTKHSLHGKTIVFDDALTLLGSFNIDPRSAYINTESAVLFDNPSFAKRVRLSLKDHAQQSWHLVLYRHRVIWEATEEGILIHEKNSPDTSFFLRLIKEWSKVLPEREL

SEQ ID NO: 9084 - protein, 224 aa, Helicobacter pylori
  misc_feature (B) LOCATION 1...224
  hypothetical: YES
FLFSGSFLKIFLVILSVFFFNGCFGLAYKTPISNPPISYDPYTTTIGSLYAKNLKENPKHSAAILLEDGFDALLHRVGLIRMSQKSIDMQTYIYKNDLSSQVIAKELLNAANRGVKVRILLDDNGLDSDFSDIMLLNFHKNIEVKIFNPYYIRNKGLRYFEMLADYERIKKRMHNKLFIVDNFAVIIGGRNIGDNYFDNDLDTNFLDLDALFFGGVATDVQQNF

SEQ ID NO: 9085 - protein, 502 aa, Helicobacter pylori
  misc_feature (B) LOCATION 1...502
  hypothetical: YES
LKIFLVILSVFFFNGCFGLVYKTPISNPPISYDPYTTTIGSLYAKNLKENPKHSAAILLEDGFDALLHRVGLIRMSQKSIDMQTYIYKNDLSSQVIAKELLNAANRGVKVRILLDDNGLDSDFSDIMLLNFHKNIEVKIFNPYYIRNKGLRYFEMLADYERIKKRMHNKLFIVDNFAVIIGGRNIGDNYFDNDLDTNFLDLDALFFGGVASKAKESFENYWRFHRSIPVSLLRTHKRLKNNVKEIAKLHEKIPISAEDANEFEKKVNDFIERFQKYQYPIYYGNAIFLADLPAKIDTPLYSPIKIAFEKALKNAKDSVFIASSYFIPGKKIMKIFKNQISKGIELNILTNSLSSTDAIVVYGAWERYRNKLVRMGANVYEIRNDFFNRQIKGRFSTKHSLHGKTIVFDDALTLLGSFNIDPRSAYINTESAVLFDNPSFAKRVRLSLKDHAQQSWHLVLYRHRVIWEATEEGILIHEKNSPDTSFFLRLIKEWSKVLPEREL

SEQ ID NO: 9086 - protein, 502 aa, Helicobacter pylori
  misc_feature (B) LOCATION 1...502
  hypothetical: YES
LKIFLVILSVFFFNGCFGLAYKTPISNPPISYDPYTTTIGSLYAKNLKENPKHSAAILLEDGFDALLHRVGLIRMSQKSIDMQTYIYKNDLSSQVIAKELLNAANRGVKVRILLDDNGLDSDFSDIMLLNFHKNIEVKIFNPYYIRNKGLRYFEMLADYERIKKRMHNKLFIVDNFAVIIGGRNIGDNYFDNDLDTNFLDLDALFFGGVASKAKESFENYWRFHRSIPVSLLRTHKRLKNNVKEIAKLHEKIPISAEDANEFEKKVNDFIERFQKYQYPIYYGNAIFLADLPAKIDTPLYSPIKIAFEKALKNAKDSVFIASSYFIPGKKIMKIFKNQISKGIELNILTNSLSSTDAIVVYGAWERYRNKLVRMGANVYEIRNDFFNRQIKGRFSTKHSLHGKTIVFDDALTLLGSFNIDPRSAYINTESAVLFDNPSFAKRVRLSLKDHAQQSWHLVLYRHRVIWEATEEGILIHEKNSPDTSFFLRLIKEWSKVLPEREL

SEQ ID NO: 9087 - protein, 198 aa, Helicobacter pylori
  misc_feature (B) LOCATION 1...198
  hypothetical: YES
VLKKMIGLVAVLSVLLARDNPFEPEINSKNLQGGFSGIYDDYLKEIHVDLPTSARILKKITLTYQDIDGSIHSKVVGIDKSIDWHYPLKLSQHTLNQDAFEKRYQIQDFDFLMANNTMILRSPYKILRSFVLVNPYRIVLDTQKGPLDIYQNMDLNQKFFSHIKVGTHKDYYRITLILDGKYRYLLEEKNGAYELKLK

SEQ ID NO: 9088 - protein, 200 aa, Helicobacter pylori
  misc_feature (B) LOCATION 1...200
  hypothetical: YES
MAVLKKMIGLVAVLSVLLARDNPFEPEINSKNLQGGFSGIYDDYLKEIHVDLPTSARILKKITLTYQDIDGSIHSKVVGIDKSIDWHYPLKLSQHTLNQDAFEKRYQIQDFDFLMANNTMILRSPYKILRSFVLVNPYRIVLDTQKGPLDIYQNMDLNQKFFSHIKVGTHKDYYRITLILDGKYRYLLEEKNGAYELKLK

SEQ ID NO: 9089 - protein, 211 aa, Helicobacter pylori
  misc_feature (B) LOCATION 1...211
  hypothetical: YES
GNYGLEIRFKEMAVLKKMIGLVAVLSVLLARDNPFEPEINSKNLQGGFSGIYDDYLKEIHVDLPTSARILKKITLTYQDIDGSIHSKVVGIDKSIDWHYPLKLSQHTLNQDAFEKRYQIQDFDFLMANNTMILRSPYKILRSFVLVNPYRIVLDTQKGPLDIYQNMDLNQKFFSHIKVGTHKDYYRITLILDGKYRYLLEEKNGAYELKLK

SEQ ID NO: 9090 - protein, 63 aa, Helicobacter pylori
  misc_feature (B) LOCATION 1...63
  hypothetical: YES
KIKGKEMKFLNGLAGNLLIVVILLCVVVFFALKAIHIQKEQATNYYRYKDINALEAKNTQNHA

SEQ ID NO: 9091 - protein, 68 aa, Helicobacter pylori
  misc_feature (B) LOCATION 1...68
  hypothetical: YES
MKFLNGLAGNLLIVVILLCVVVFFALKAIHIQKEQATNYYRYKDINALEAKNTQNHANYELVNQGSKK

SEQ ID NO: 9092 - protein, 114 aa, Helicobacter pylori
  misc_feature (B) LOCATION 1...114
  hypothetical: YES
QQLLEQAGKVAPSEVPEFRTEVNKRLEAMKEEERQKYKADFKKAMDKNLASLSQEDRNKRKKEILEVIANKKKTMTMKEYREEGLDLHDCACEGPFHDHEKKGQKGKKPSHHKH

SEQ ID NO: 9093 - protein, 149 aa, Helicobacter pylori
  misc_feature (B) LOCATION 1...149
  hypothetical: YES
LNWEHLMKKLAFSLLFTGTFLGLFLNASDFKSMDNKQLLEQAGKVAPSEVPEFRTEVNKRLEAMKEEERQKYKADFKKAMDKNLASLSQEDRNKRKKEILEVIANKKKTMTMKEYREEGLDLHDCACEGPFHDHEKKGQKGKKPSHHKH

SEQ ID NO: 9094 - protein, 285 aa, Helicobacter pylori
  misc_feature (B) LOCATION 1...285
  hypothetical: YES
VKRILFFLAATTFLLRAETASATINTTVDPNVMFSESSTGNVKKDRKRVLKSMVDLEKERVKNFNQYSETKMSKGDLSAFGAFFKGSLEDCVEQKICYYEHRNGKVSFVVNDREKFYKHVLKDLGTELSLPLFNWLYKGSDFGALHEQFGDMYDGYIKYLISMVRVSQKEKARKVDAIVLKKMEEQAEKDTKAAFQKRSSGELESHTDSPEFISSSKTQNSSNPDLDPMTNANTLKETASKEPETSSKKEKKPKKKRRLSKKEKQQQALQQEFEKQISDSSKSEK

SEQ ID NO: 9095 - protein, 288 aa, Helicobacter pylori
  misc_feature (B) LOCATION 1...288
  hypothetical: YES
EFGVKRILFFLAATTFLLRAETASATINTTVDPNVMFSESSTGNVKKDRKRVLKSMVDLEKERVKNFNQYSETKMSKGDLSAFGAFFKGSLEDCVEQKICYYEHRNGKVSFVVNDREKFYKHVLKDLGTELSLPLFNWLYKGSDFGALHEQFGDMYDGYIKYLISMVRVSQKEKARKVDAIVLKKMEEQAEKDTKAAFQKRSSGELESHTDSPEFISSSKTQNSSNPDLDPMTNANTLKETASKEPETSSKKEKKPKKKRRLSKKEKQQQALQQEFEKQISDSSKSEK

SEQ ID NO: 9096 - protein, 111 aa, Helicobacter pylori
  misc_feature (B) LOCATION 1...111
  hypothetical: YES
VFEPVIAYKLFHSFVILGCAIETLTTKCVEGITANEKICHDYVFNSIGIVTALNPHIGYEKSAMIAKEALKSDRSIYDIALEKKILTKEQLDDIFKPENMLRTHAFKKHKD

SEQ ID NO: 9097 - protein, 115 aa, Helicobacter pylori
  misc_feature (B) LOCATION 1...115
  hypothetical: YES
LQLNVFEPVIAYKLFHSFVILGRAIETLTTKCVEGITANEKICHDYVFNSIGIVTALNPHIGYEKSAMIAKEALKSDRSIYDIALEKKILTKEQLDDIFKPENMLSPHAFKKHKD

SEQ ID NO: 9098 - protein, 115 aa, Helicobacter pylori
  misc_feature (B) LOCATION 1...115
  hypothetical: YES
LQLNVFEPVIAYKLFHSFVILGCAIETLTTKCVEGITANEKICHDYVFNSIGIVTALNPHIGYEKSAMIAKEALKSDRSIYDIALEKKILTKEQLDDIFKPENMLSPHAFKKHKD

SEQ ID NO: 9099 - protein, 119 aa, Helicobacter pylori
  misc_feature (B) LOCATION 1...119
  hypothetical: YES
PEGGNELNVFEPVIAYKLFHSFVILGCAIETLTTKCVEGITANEKICHDYVFNSIGIVTALNPHIGYEKSAMIAKEALKSDRSIYDIALEKKILTKEQLDDIFKPENMLSPHAFKKHKD

SEQ ID NO: 9100 - protein, 65 aa, Helicobacter pylori
  misc_feature (B) LOCATION 1...65
  hypothetical: YES
GNDDTGNTNDDMGNSNDMGDDMNNANDMNDDMGNSNDDMGDMGDMNDDMGGDMGDMGDMGGDMGN

SEQ ID NO: 9101 - protein, 498 aa, Helicobacter pylori
  misc_feature (B) LOCATION 1...498
  hypothetical: YES
SIIVAEIFFKVINESDKNTSYNDTQFNAISVNRALFDLKDSQLKGELTPKIVDFGGYKSNTTEWGATALNYINAANGDAKKFSALVEKMRFNSGILGNFRAHAHLRQALKLQKNLKYCLKIIARDSFYSYRTGIYIPLGISLKDQKTAQKMLADLSVVGAYLKSNQENEKAQSPYYRSNNYYNSYYSPYYGMYGMYGMGMYGMYGMGMYDFYDFYDGMYGFYPNMFFMMQVQDYLMLENYMYALDQEEILDHDASINQLDTPTDDDRDDKDDKSSQPANLMSFYRDPKFSKDIQTNRLNSALVNLDNSHMLKDNSLFHTKAMPTKSVDAITSQAKELNHLVGQIKEMKQDGASPNKIDSVVNKAMEVRDKLDNNLNQLDNDLKDQKGLSSEQQAQVDKALDSVQQLSHSSDVVGNYLDGSLKIDGDDRDDLNDAINNPMQQPAQQTPINNMDNTHANDSKDQGGNALINPNNATNDDHNDDHMDTNTTDTRQRKRHPH

SEQ ID NO: 9102 - protein, 590 aa, Helicobacter pylori
  misc_feature (B) LOCATION 1...590
  hypothetical: YES
MKAIKILLIMTLSLNAISVNRALFDLKDSQLKGELTPKIVDFGGYKSNTTEWGATALNYINAANGDAKKFSALVEKMRFNSGILGNFRAHAHLRQALKLQKNLKYCLKIIARDSFYSYRTGIYIPLGISLKDQKTAQKMLADLSVVGAYLKKQQENEKAQSPYYRSNNYYNSYYSPYYGMYGMYGMGMYGMYGMGMYDFYDFYDGMYGFYPNMFFMMQVQDYLMLENYMYALDQEEILDHDASINQLDTPTDDDRDDKDDKSSQPANLMSFYRDPKFSKDIQTNRLNSALVNLDNSHMLKDNSLFHTKAMPTKSVDAITSQAKELNHLVGQIKEMKQDGASPNKIDSVVNKAMEVRDKLDNNLNQLDNDLKDQKGLSSEQQAQVDKALDSVQQLSHSSDVVGNYLDGSLKIDGDDRDDLNDAINNPMQQPAQQTPINNMDNTHANDSKDQGGNALINPNNATNDDHNDDHMDTNTTDTSNANDTPTDDKDASGNNTGDMNNTDTGNTDTGNTDTGNTDDMSNMNNGNDDTGNTNDDMGNSNDMGDDMNNANDMNDDMGNSNDDMGDMGDMNDDMGGDMGDMGDMGGDMGN

SEQ ID NO: 9103 - protein, 108 aa, Helicobacter pylori
  misc_feature (B) LOCATION 1...108
  hypothetical: YES
MKTNFYKIKLLFAWCLIIGMFNAPLNADQNTDIKDISPEDMALNSVGLVSRDQLKIEIPKETLEQKVTILNDYNDKNVNIKFDDISLGSFQPNDNLGINAMWGIQNLL

SEQ ID NO: 9104 - protein, 142 aa, Helicobacter pylori
  misc_feature (B) LOCATION 1...142
  hypothetical: YES
MKTNFYKIKLLFAWCLIIGMFNAPLNADQNTDIKDISPEDMALNSVGLVSRDQLKIEIPKETLEQKVAILNDYNDKNVNIKFDDISLGSFQPNDNLGINAMWGIQNLLMSQMMSNYGPNNSFMYGYAPTYSDSSFLPPILGY

SEQ ID NO: 9105 - protein, 154 aa, Helicobacter pylori
  misc_feature (B) LOCATION 1...154
  hypothetical: YES
NNAKNKNKGVKSMKTNFYKIKLLFAWCLIIGMFNAPLNADQNTDIKDISPEDMALNSVGLVSRDQLKIEIPKETLEQKVAILNDYNDKNVNIKFDDISLGSFQPNDNLGINAMWGIQNLLMSQMMSNYGPNNSFMYGYAPTYSDSSFLPPILGY

SEQ ID NO: 9106 - protein, 208 aa, Helicobacter pylori
  misc_feature (B) LOCATION 1...208
  hypothetical: YES
LINNNNNNKKLRGFFLKVLLSLVVFSSYGSANDDKEAKKEALEKEKNTPNGLVYTNLDFDSFKATIKNLKDKKVTFKEVNPDIIKDEVFDFVIVNRVLKKIKDLKHYDPVIEKIFDEKGKEMGLNVELQINPEVKDFFTFKSISTTNKQRCFLSLHGETREILCDDKLYNVLLAVFNSYDPNDLLKHISTIESLKKIFYTITCEAVYL

SEQ ID NO: 9107 - protein, 214 aa, Helicobacter pylori
  misc_feature (B) LOCATION 1...214
  hypothetical: YES
VEELAKLINNNNNNKKLRGFFLKVLLSLVVFSSYGSANDDKEAKKEALEKEKNTPNGLVYTNLDFDSFKATIKNLKDKKVTFKEVNPDIIKDEVFDFVIVNRVLKKIKDLKHYDPVIEKIFDEKGKEMGLNVELQINPEVKDFFTFKSISTTNKQRCFLSLHGETREILCDDKLYNVLLAVFNSYDPNDLLKHISTIESLKKIFYTITCEAVYL

SEQ ID NO: 9108 - protein, 224 aa, Helicobacter pylori
  misc_feature (B) LOCATION 1...224
  hypothetical: YES
ALSLASILARVEELAKLINNNNNNKKLRGFFLKVLLSLVVFSSYGSANDDKEAKKEALEKEKNTPNGLVYTNLDFDSFKATIKNLKDKKVTFKEVNPDIIKDEVFDFVIVNRVLKKIKDLKHYDPVIEKIFDEKGKEMGLNVELQINPEVKDFFTFKSISTTNKQRCFLSLHGETREILCDDKLYNVLLAVFNSYDPNDLLKHISTIESLKKIFYTITCEAVYL

SEQ ID NO: 9109 - protein, 69 aa, Helicobacter pylori
  misc_feature (B) LOCATION 1...69
  hypothetical: YES
MAGTQAIYESSSAGFLSQVSSIISSTSGVAGPFAGIVAGAMTAAIIPIVVGFTNPQMTDIINPIKSKHR

SEQ ID NO: 9110 - protein, 109 aa, Helicobacter pylori
  misc_feature (B) LOCATION 1...109
  hypothetical: YES
GIKLGGINMAGTQAIYESSSAGFLSQVSSIISSTSGVAGPFAGIVAGAMTAAIIPIVVGFTNPQMTAIMTQYNQSIAEAVSVPMKAANQQYSQLYQGFNDQSMAVGTIS

SEQ ID NO: 9111 - protein, 132 aa, Helicobacter pylori
  misc_feature (B) LOCATION 1...132
  hypothetical: YES
KPLTNNTANCIKVLTIKAWLWEQYLKYQQINRGNLTRKGNTQSAQISAVNSQIASILASNTTPKNPSAIEAYATNQIAVPSVPTTVEMMSGILGNITSAAPKYALALQEQLRSQASNSSMNDTADSLDSCTA

SEQ ID NO: 9112 - protein, 245 aa, Helicobacter pylori
  misc_feature (B) LOCATION 1...245
  hypothetical: YES
MAGTQAIYESSSAGFLSQVSSIISSTSGVAGPFAGIVAGAMTAAIIPIVVGFTNPQMTAIMTQYNQSIAEAVSVPMKAANQQYNQLYQGFNDQSMAVGNNILNISKLTGEFNAQGNTQSAQISAVNSQIASILASNTTPKNPSAIEAYATNQIAVPSVPTTVEMMSGILGNITSAAPKYALALQEQLRSQASNSSMNDTADSLDSCTALGALVGSSKVFFSCMQISMTPMSVSMPTVMPNTSGCH

SEQ ID NO: 9113 - protein, 113 aa, Helicobacter pylori
  misc_feature (B) LOCATION 1...113
  hypothetical: YES
MKRLAVALILVLGVVWGKSLPKWAKDCSKEMRIEKTQTKDEKILVCGMSDILLSDMDYSLSSARQNALEKVMEAFKGDRIEIKAGELKATFIDTDKVYVLLRITKKHVALMNE

SEQ ID NO: 9114 - protein, 113 aa, Helicobacter pylori; identical to SEQ ID NO: 9113
  misc_feature (B) LOCATION 1...113
  hypothetical: YES

SEQ ID NO: 9115 - protein, 121 aa, Helicobacter pylori
  misc_feature (B) LOCATION 1...121
  hypothetical: YES
AWLKSRVLMKRLAVALILVLGVVWGKSLPKWAKDCSKEMRIEKTQTKDEKILVCGMSDILLSDMDYSLSSARQNALEKVMEAFKGDRIEIKAGELKATFIDTDKVYVLLRITKKHVALMNE

SEQ ID NO: 9116 - protein, 225 aa, Helicobacter pylori
  misc_feature (B) LOCATION 1...225
  hypothetical: YES
MRATAIKIFSFSSALALLLQGCLSINLKQMLPEIRTYDLNASSFEMTQCPKPLTEVRLISILSADLFNTKEIVFKAQDGQITHGKHQKWIDLPRNMLKTMFMQEAQKACLGVALPPYGAGAPTYAVRFTILSFSLLEKENSTYRAEFALGYDISVKGDSHSGVIIKHENISSLENKTTKTSKNGSQDFQESAIQSLQHVSTQAMQEAISLIKKAVEAQSVSPLKK

SEQ ID NO: 9117 - protein, 234 aa, Helicobacter pylori
  misc_feature (B) LOCATION 1...234
  hypothetical: YES
NDFWRKEITMRATAIKIFSFSSALALLLQGCLSINLKQMLPEIRTYDLNASSFEMTQCPKPLTEVRLIIILSADLFNTKEIVFKAQDGQITHGKHQKWIDLPRNMLKTMFMQEAQKACLGVALPPYGAGAPTYAVRFTILSFSLLEKENSTYRAEFALGYDISVKGDSHSGVIIKHENISSLENKTTKTSKNGSQDFQESAIQSLQHVSTQAMQEAISLIKKAVEAQSVSPLKK

SEQ ID NO: 9118 - protein, 259 aa, Helicobacter pylori
  misc_feature (B) LOCATION 1...259
  hypothetical: YES
MACWHKRLAVGCCIVLLSCVMSANNVSIVRDDPPLDPTLPAWIYSVALLKVYFSDGTYKEGYATLLENGRYIASSETLYSNGLYPKMILAKMQDSSAKELICIASLHLEAMDRDQGLSLLKTADFRDDYCHKREESYYHARIYAKYAQTFHSNPYTNQKTPTSDLYYPALNEGNSFSIQTTDISVAELLKSKKFLSLDASFKKGSVLWGGRPYFSEVGEFMGMASSTLENQESLVIIPKEKIARFLSALKNQNIFPNIP

SEQ ID NO: 9119 - protein, 264 aa, Helicobacter pylori
  misc_feature (B) LOCATION 1...264
  hypothetical: YES
AVSWIMACWHKRLAVGCCIVLLSCVMSANNVSIVRDDPPLDPTLPAWIYSVALLKVYFSDGTYKEGYATLLENGRYIASSETLYSNGLYPKMILAKMQDSSAKELICIASLHLEAMDRDQGLSLLKTADFRDDYCHKREESYYHARIYAKYAQTFHSNPYTNQKTPTSDLYYPALNEGNSFSIQTTDISVAELLKSKKFLSLDASFKKGSVLWGGRPYFSEVGEFMGMTSSTLENQESLVIIPKEKIARFLSALKNQNIFPNIP

SEQ ID NO: 9120 - protein, 195 aa, Helicobacter pylori
  misc_feature (B) LOCATION 1...195
  hypothetical: YES
LNLRLAGASVLTACVFSGCFFLKMFDKKLSSNDWHIQKVEMNHQVYDIETMLADSAFREHEEEQDSSLNTALPEDKTAIEAKEQEQKEKRKHWYELFKKKPKPKSSMGEFVFDQKENRIYGKGYCNRYFASYTWQGDRHIAIEDSGISRKVCRDEHLMAFELEFMENFKGNFAVTKGKDTLILDNQKMKIYLKTP

SEQ ID NO: 9121 - protein, 201 aa, Helicobacter pylori
  misc_feature (B) LOCATION 1...201
  hypothetical: YES
KIRRNCLNLRLAGASVLTACVFSGCFFLKMFDKKLSSNDWHIQKVEMNHQVYDIETMLADSAFREHEEEQDSSLNTALPEDKTAIEAKEQEQKEKRKHWYELFKKKPKPKSSMGEFVFDQKENRIYGKGYCNRYFASYTWQGDRHIAIEDSGISRKVCRDEHLMAFELEFMENFKGNFAVTKGKDTLILDNQKMKIYLKTP

SEQ ID NO: 9122 - protein, 271 aa, Helicobacter pylori
  misc_feature (B) LOCATION 1...271
  hypothetical: YES
LERHVNYTLIGGLFFLCLVCMVGFILWLGHLGLDDGKYYEYVVYTDKDLGGIATNSPINYKGIQVGNVIKVGFAKDKVGVVRLDLMIKSSVKIRKDSKVAVSSRGFMGLKFLALEQSHNEEFYGSGDKGERILIFKEGLMDRLSGDANQVVQEVMKAIRNVNRILDDENVEKFKHILASVDDLIANLDSRKTQFDSLINNANNLVSNVNNVALDVDKRVKQGQYDFKAMFTPLIMQAQLSLRNIDNFVEKGSALIDKFDANPYKTIFGERK

SEQ ID NO: 9123 - protein, 283 aa, Helicobacter pylori
  misc_feature (B) LOCATION 1...283
  hypothetical: YES
RQFIQFNTRREILERHVNYTLIGGLFFLCLVCMVGFILWLGHLGLDDGKYYEYVVYTDKDLGGIATNSPINYKGIQVGNVIKVGFAKDKVGVVRLDLMIKSSVKIRKDSKVAVSSRGFMGLKFLALEQSHNEEFYGSGDKGERILIFKEGLMDRLSGDANQVVQEVMKAIRNVNRILDDENVEKFKHILASVDDLIANLDSRKTQFDSLINNANNLVSNVNNVALDVDKRVKQGQYDFKAMFTPLIMQAQLSLRNIDNFVEKGSALIDKFDANPYKTIFGERK

SEQ ID NO: 9124 - protein, 101 aa, Helicobacter pylori
  misc_feature (B) LOCATION 1...101
  hypothetical: YES
MKLVIEEIVENGCSLANEIKIDGNTAFGLNKRYPNIQTIIKGDETIAQIAMASVLAKASKDREMLELHALFKEYGWDKNCGYGTKQHIEAINKLGATLSSA

SEQ ID NO: 9125 - protein, 121 aa, Helicobacter pylori
  misc_feature (B) LOCATION 1...121
  hypothetical: YES
RNCRKWLSLANEIKIDGNTVFGLNKRYPNIQTIIKGDETIAQIAMAPVLAKASKDREMLELHALFKEYGWDKNCGYGTKQHIEAINKLGATPLIGIGFTLKNRNLNPKLLEVEQRPCLKWR

SEQ ID NO: 9126 - protein, 187 aa, Helicobacter pylori
  misc_feature (B) LOCATION 1...187
  hypothetical: YES
LGCVSMTLGIDEAGRGCLAGSLFVAGVVCNEKIALEFLKMGLKDSKKLSPKKRFFLEDKIKTHGEVGFFVVKKSANEIDHLGLGACLKLAIEEIVENGCSLANEIKIDGNTAFGLNKRYPNIQTIIKGDETIAQIAMASVLAKASKDREMLELHALFKEYGWDKNCGYGTKQHIEAINKLGATLSSA

SEQ ID NO: 9127 - protein, 204 aa, Helicobacter pylori
  misc_feature (B) LOCATION 1...204
  hypothetical: YES
MTLGIDEAGRGCLAGSLFVAGVVCNEKIALEFLKMGLKDSKKLSPKKRFFLEDKIKTHGEVGFFVVKKSANEIDHLGLGACLKLAIEEIVENGCSLANEIKIDGNTAFGLNKRYPNIQTIIKGDETIAQIAMASVLAKASKDREMLELHALFKEYGWDKNCGYGTKQHIEAINKLGATPFHRHSFTLKNRILNPKLLEVEQRLV

SEQ ID NO: 9128 - protein, 64 aa, Helicobacter pylori
  misc_feature (B) LOCATION 1...64
  hypothetical: YES
MALGGASSESKIAAKAKESAALGQVNEVESYLKDVKALAPIDGEVSNVLLSGGELSPKGFLWCS

SEQ ID NO: 9129 - protein, 84 aa, Helicobacter pylori
  misc_feature (B) LOCATION 1...84
  hypothetical: YES
SLCGYESTKYNESAAYQKYKMALGGASSESKIAAKAKESAALGQVNEVESYLKDVKALAPIDGEVSNVLLSGGELSPKGFLWCS

SEQ ID NO: 9130 - protein, 96 aa, Helicobacter pylori
  misc_feature (B) LOCATION 1...96
  hypothetical: YES
VVLMIDLKDSWLKISVPEKYLNEFKVGKEFEGYIPALKRSAKFRVKYLSVMGDFATWKATNNSNTYDMKSYEVEAIPLEELENFRVGMSVLVTIKP

SEQ ID NO: 9131 - protein, 99 aa, Helicobacter pylori
  misc_feature (B) LOCATION 1...99
  hypothetical: YES
GLPVVLMIDLKDSWLKISVPEKYLNEFKVGKEFEGYIPALKRSAKFRVKYLSVMGDFATWKATNNSNTYDMKSYEVEAIPLEELENFRVGMSVLVTIKP

SEQ ID NO: 9132 - protein, 174 aa, Helicobacter pylori
  misc_feature (B) LOCATION 1...174
  hypothetical: YES
MSNSMLDKNKAILTGGGALLLGLIVLFYLAYRPKAEVLQGFLEAREYSVSSKVPGRIEKVFVKKGDRIKKGDLVFSISSPELEAKLAQAEAGHKAAKAVSDEVKRGSRDETINSARDVWQAAKSQANLAKETYKRVQDLYDNGVASLQKRDEAYAAMKAPNTTRARLTKSIKWL

SEQ ID NO: 9133 - protein, 182 aa, Helicobacter pylori
  misc_feature (B) LOCATION 1...182
  hypothetical: YES
ICLLKEKIMSNSMLDKNKAILTGGGALLLGLIVLFYLAYRPKAEVLQGFLEAREYSVSSKVPGRIEKVFVKKGDRIKKGDLVFSISSPELEAKLAQAEAGHKAAKAVSDEVKRGSRDETINSARDVWQAAKSQANLAKETYKRVQDLYDNGVASLQKRDEAYAAMKAPNTTRARLTKSIKWL

SEQ ID NO: 9134 - protein, 329 aa, Helicobacter pylori
  misc_feature (B) LOCATION 1...329
  hypothetical: YES
MSNSMLDKNKAILTGGGALLLGLIVLFYLAYRPKAEVLQGFLEAREYSVSSKVPGRIEKVFVKKGDRIKKGDLVFSISSPELEAKLAQAEAGHKAAKAVSDEVKRGSRDETINSARDVWQAAKSQANLAKETYKRVQDLYDNGVASLQKRDEAYAAYESTKYNESAAYQKYKMALGGASSESKIAAKAKESAALGQVNEVESYLKDVKALAPIDGEVSNVLLSGGELSPKGFPVVLMIDLKDSWLKISVPEKYLNEFKVGKEFEGYIPALKRSAKFRVKYLSVMGDFATWKATNNSNTYDMKSYEVEAIPLEELENFRVGMSVLVTIKP

SEQ ID NO: 9135 - protein, 128 aa, Helicobacter pylori
  misc_feature (B) LOCATION 1...128
  hypothetical: YES
KVGPICMSKSAIFVLSGFLAFLLYALLLYGLLLERHNKEAEKILLDLNKKDEQAIDLNLEDLPSEKKNEKIEKVTEKQGDFLEPKEEPKEEPEESLEDIFSSLNDFQERQTKTLKKTSKKMNKKNKGV

SEQ ID NO: 9136 - protein, 164 aa, Helicobacter pylori
  misc_feature (B) LOCATION 1...164
  hypothetical: YES
FSRKTDKNAQKDEQKNEQEEQRRLREQQRLKQNQENQEMLKGLQQNLNQFTQKLESVKNKTLDLQIPKQDGVDEKAYQEWYAQIYQILYKGWRGVFYHKASVSVLIMITKDGEFDYTILSYSDFKDYNKSVMTLLDDLKKVDFPPYPGGNMISIKVNFTTKEEQ

SEQ ID NO: 9137 - protein, 263 aa, Helicobacter pylori
  misc_feature (B) LOCATION 1...263
  hypothetical: YES
MSKSAIFVLSGFLAFLLYALLLYGLLLERHNKEAEKILLDLNKKDEQAIDLNLEDLPSEKKNEKIEKVTEKQGDFLEPKEEPKEEPEESLEDIFSSLNDFQEKTDKNAQKDEQKNEQEEQRRLREQQRLKQNQENQEMLKGLQQNLNQFTQKLESVKNKTLDLQIPKQDGVDEKAYQEWYAQIYQILYKGWRGVFYHKASVSVLIMITKDGEFDYTILSYSDFKDYNKSVMTLLDDLKKVDFPPYPGGNMISIKVNFTTKEEQ

SEQ ID NO: 9138 - protein, 68 aa, Helicobacter pylori
  misc_feature (B) LOCATION 1...68
  hypothetical: YES
MNSSNLKNWLFPTICFFLFCYILIFLIFFMFKNLQSQSFGSVAETGKKPITTTKKFGKELQKQISKIH

SEQ ID NO: 9139 - protein, 72 aa, Helicobacter pylori
  misc_feature (B) LOCATION 1...72
  hypothetical: YES
KGKVMNSSNLKNWLFPTICFFLFCYILIFLIFFMFKNLQSQSFGSVAETGKKPITTTKKFGKELQKQISKIH

SEQ ID NO: 9140 - protein, 167 aa, Helicobacter pylori
  misc_feature (B) LOCATION 1...167
  hypothetical: YES
QTADNYYSSLQSEHINSPLVPEAMLALGQAHMKKKEYVLASFYFDEYIKRFGTKDNVNYLTFLKLQSHYYAFKNHSKDQEFISNSIVSLGEFIEKYPNSRYRPKVDNRQIKFILGQNELNRAIANVYKKRHKPEGVKRYLERIDETLEKETKPKPSHMPWYVLIFDW

SEQ ID NO: 9141 - protein, 232 aa, Helicobacter pylori
  misc_feature (B) LOCATION 1...232
  hypothetical: YES
VVQKFNFYKTGGMRLKHFKTFLFITMAVIVIGTGCANKKKKKDEYNKPAIFWYQGILREILFANLETADNYYSSLQSEHINSPLVPEAMLALGQAHMKKKEYVLASFYFDEYIKRFGTKDNVDYLTFLKLQSHYYAFKNHSKDQEFISNSIVSLGEFIEKYPNSRYRPYVEYMQIKFILGQNELNRAIANVYKKRHKPEGVKRYLERIDETLEKETKPKPSHMPWYVLIFDW

SEQ ID NO: 9142 - protein, 67 aa, Helicobacter pylori
  misc_feature (B) LOCATION 1...67
  hypothetical: YES
LDLDPIGNAMPQTLAQTETQKSQIEKSLIEEAQTQKSQEMKEAASEQAIKKPLEKEKDNPMYLRSNQ

SEQ ID NO: 9143 - protein, 80 aa, Helicobacter pylori
  misc_feature (B) LOCATION 1...80
  hypothetical: YES
RDGENCYIKDDAFASEVALKELLYWKTRYHDNLKDMIKSYNKGSRREEHEKANADAAIYYEEIQDRIRRLPASKILELAV

SEQ ID NO: 9144 - protein, 84 aa, Helicobacter pylori
  misc_feature (B) LOCATION 1...84
  hypothetical: YES
NSLYSHDRELQKSANSNLDLDPIGNSMPQTLAQTETQKSQIEKSQIEEAQTQKSQEMKEAASEQAIKKPLEKEKDNPMYLRSNQ

SEQ ID NO: 9145 - protein, 217 aa, Helicobacter pylori
  misc_feature (B) LOCATION 1...217
  hypothetical: YES
LKHLAPLIHIPFKALWLGTALSMFLSLNLNAEENPTKTEPKPAKGVKNKPKSPVTNVMMTNCDNLKDFNAKQKEVLKAAYQFGSKENLGYEMAGIAWKESCAGTYKINFSNPSAGIYHAYIPSVLKSYGHNNSPFLRNVMGELLIKDDAFASEVALKELLYWKTRYHDNLKDMIKSYNKGSRWEKNEKANADAEKYYEEIQDRIRRLKESKIFELAV

SEQ ID NO: 9146 - protein, 222 aa, Helicobacter pylori
  misc_feature (B) LOCATION 1...222
  hypothetical: YES
AFLYIHSIALARVILQLKPLLTIHLNAKSQSSLKNKITLKNKLNHARIILEFIPSLIYFLIQKVSVLKHLAPLIHIPFKALWLGTALSMFLSLNLNAEENPTKTEPKPAKGVKNKPKSPVTNVMMTNCDNLKDFNAKQKEVLKAAYQFGSTENLGYEMAGIAWKESCAGTYKINFSNPSAGIYHAYIPSVLKSYGHNNSPFLRNVMGRIATLKTMRLLLKWP

SEQ ID NO: 9147 - protein, 404 aa, Helicobacter pylori
  misc_feature (B) LOCATION 1...404
  hypothetical: YES
LNAKSQSSLKNKITLKNKLNHARIILEFIPSLIYFLIQKVSVLKHLAPLIHIPFKALWLGTALSMFLSLNLNAEENPTKTEPKPAKGVKNKPKSPVTNVMMTNCDNLKDFNAKQKEVLKAAYQFGSKENLGYEMAGIAWKESCAGTYKINFSDPSAGIYHAYIPSVLKSYGHNNSPFLRNVMGELLIKDDAFASEVALKELLYWKTRYHDNLKDMIKSYNKGSRWEKNEKANADAEKYYEEIQDRIRRLKESKIFDSQSSNDQELQKSANSNLDLDPIGNAMPQTLAQTETQKSQIEKSQIEEAQTQKSQEMKEAASEQAIKKPLEKEKDKPMYLAQINSADFAPAKKSPKKPAKASPKRSSKNNISVKSNTKTASKNKEVCKNCSPGQRNAILANHITLMQEL

SEQ ID NO: 9148 - protein, 297 aa, Helicobacter pylori
  misc_feature (B) LOCATION 1...297
  hypothetical: YES
LVKIRLFDFTIRLFKPEFHIFDFLKGIRVLMIEWMQNHRKYLVVTIWISTIAFIAAGMIGWGQYSFSLDSDSAAKVGQIKISQEELAQEYRRLKDAYAESIPDFKELTEDQIKAMHLEKSALDSLINQALLRNFALDLGLGATKQEVAKEIRKTNVFQKDGVFDEELYKNILKQSHYRPKHFEESVERLLILQKISALFPKTTTPLEQSSLSLWAKLQDKLDILILNPNDVKISLNEEEMKKYYENHRKDFKKPTSFKTRSLYFDASLEKTDLKELEEYYHKNKVSYLDXXGEITGF

SEQ ID NO: 9149 - protein, 487 aa, Helicobacter pylori
  misc_feature (B) LOCATION 1...487
  hypothetical: YES
MIEWMQNHRKYLVVTIWISTIAFIAAGMIGWGQYSFSLDSDSAAKVGQIKISQEELAQEYRRLKDAYAESIPDFKELTEDQIKAMHLEKSALDSLINQALLRNFALDLGLGATKQEVAKEIRKTNVFQKDGVFDEELYKNILKQSHYRPKHFEESVERLLILQKISALFPKTTTPLEQSSLSLWAKLQDKLDILILNPNDVKISLNEEEMKKYYENHRKDFKKPTSFKTRSLYFDASLEKTDLKELEEYYHKNKVSYLDKEGKLQDFKSVQEQVKHDLNMQKANEKALRSYIALKKGNAQNYTTQDFEKNNSPYTAEITQKLTALKPLEVLKPEPFKDGFIVVQLVSQIKDELQNFDEAKSALKTRLTQEKTLMALQTLAKEKLKDFKGKSVGYVSPNFGGTISELNQEESAKFINTLFNRQEKKGFVTIGNKVVLYQITEQNFNHPFSAEENQYMQRLVNNTKTDFFDKALIEELKKRYKIVKYIQ

SEQ ID NO: 9150 - protein, 518 aa, Helicobacter pylori
  misc_feature (B) LOCATION 1...518
  hypothetical: YES
PLVKIRLFDFTIRLFKPEFHIFDFLKGIRVLMIEWMQNHRKYLVVTIWISTIAFIAAGMIGWGQYSFSLDSDSAAKVGQIKISQEELAQEYRRLKDAYAESIPDFKELTEDQIKAMHLEKSALDSLINQALLRNFALDLGLGATKQEVAKEIRKTNVFQKDGVFDEELYKNILKQSHYRPKHFEESVERLLILQKISALFPKTTTPLEQSSLSLWAKLQDKLDILILNPNDVKISLNEEEMKKYYENHRKDFKKPTSFKTRSLYFDASLEKTDLKELEEYYHKNKVSYLDKEGKLQDFKSVQEQVKHDLNMQKANEKALRSYIALKKGNAQNYTTQDFEKNNSPYTAEITQKLTALKPLEVLKPEPFKDGFIVVQLVSQIKDELQNFDEAKSALKTRLTQEKTLMALQTLAKEKLKDFKGKSVGYVSPNFGGTISELNQEESAKFINTLFNRQEKKGFVTIGNKVVLYQITEQNFNHPFSAEENQYMQRLVNNTKTDFFDKALIEELKKRYKIVKYIQ

SEQ ID NO: 9151 - protein, 702 aa, Helicobacter pylori
  misc_feature (B) LOCATION 1...702
  hypothetical: YES
VARLVVKRRKIDYKQSIQSDSQYLQAXLNQFENKEVYENQYFLVLESTHSLHGVLEHKKKSFMHANRENFKDILSYKAHFLQETLKSLEIQLKNYAPKLLNSKEVLNFYAEYINGFELPLKPLVGGYLSDSYIASSITFEKDYFIQESFNQKTYNRLIGIKAYESERITSIAVGALLYQETPLDIIFSIEPMSVNKTLSFLKERAKFSMSNLVKNELLEYQELVKTKRLSMQKFALNVLIKAPSLEDLDAQTSLILGLLFKENLVGVIETFGLKGGYFSFFPERIHLNHRLRFLTSKALACLMVFERQNLGFKANSWGNSPLSVFKNLDYSPFLFNFHNQEVSHNNAKEIARVNGHTLVIGATGSGKSTLISYLMMSALKYQNMRLLAFDRMQGLYSFTEFFKGHYHDGQSFSINPFCLEPNLQNLEFLQSFFLSMLDLAPSRDKEALEDMNAISGAIKSLYETLYPKDFSLLDFKETLKRTSSNQLGLSLEPYLNNPLFNALNDAFNSNAFLNVINLDAITQNPKDLGLLAYYLFYKILEESRKNDSGFLVFLDEFKSYVENDLLNTKINALITQARKANGVVVLALQDIYQLSGVKNAHSFLSNMGTLILYPQKNARELKHNFNVPLSETEISFLENTPLYARQVLVKNLGNGSSNMIDVSLEGLGCYLKIFNSDSSHVNKVKALQKDYPTEWREKLLKS

SEQ ID NO: 9152 - protein, 787 aa, Helicobacter pylori
  misc_feature (B) LOCATION 1...787
  hypothetical: YES
MLEKLLSAIKQKVSNYFLGVLPKSYSMSEENNILGLYDEHFLLTKNENLVGILRLEGVSYTHLSTEQLQDLFTERQMALDSLEKVVARLVVKRRKIDYKQSIQSDSQYLQAILNQFENKEVYENQYFLVLESTHSLHGVLEHKKKSFMHANRENFKDILSYKAHFLQETLKSLEIQLKNYAPKLLNSKEVLNFYAEYINGFELPLKPLVGGYLSDSYIASSITFEKDYFIQESFNQKTYNRLIGIKAYESERITSIAVGALLYQETPLDIIFSIEPMSVNKTLSFLKERAKFSMSNLVKNELLEYQELVKTKRLSMQKFALNVLIKAPSLEDLDAQTSLILGLLFKENLVGVIETFGLKGGYFSFFPERIHLNHRLRFLTSKALACLMVFERQNLGFKANSWGNSPLSVFKNLDYSPFLFNFHNQEVSHNNAKEIARVNGHTLVIGATGSGKSTLISYLMMSALKYQNMRLLAFDRMQGLYSFTEFFKGHYHDGQSFSINPFCLEPNLQNLEFLQSFFLSMLDLAPSRDKEALEDMNAISGAIKSLYETLYPKDFSLLDFKETLKRTSSNQLGLSLEPYLNNPLFNALNDAFNSNAFLNVINLDAITQNPKDLGLLAYYLFYKILEESRKNDSGFLVFLDEFKSYVENDLLNTKINALITQARKANGVVVLALQDIYQLSGVKNAHSFLSNMGTLILYPQKNARELKHNFNVPLSETEISFLENTPLYARQVLVKNLGNGSSNMIDVSLEGLGCYLKIFNSDSSHVNKVKALQKDYPTEWREKLLKS

SEQ ID NO: 9153 - protein, 797 aa, Helicobacter pylori
  misc_feature (B) LOCATION 1...797
  hypothetical: YES
RLKPNVIERRMLEKLLSAIKQKVSNYFLGVLPKSYSMSEENNILGLYDEHFLLTKNENLVGILRLEGVSYTHLSTEQLQDLFTERQMALDSLEKVVARLVVKRRKIDYKQSIQSDSQYLQAILNQFENKEVYENQYFLVLESTHSLHGVLEHKKKSFMHANRENFKDILSYKAHFLQETLKSLEIQLKNYAPKLLNSKEVLNFYAEYINGFELPLKPLVGGYLSDSYIASSITFEKDYFIQESFNQKTYNRLIGIKAYESERITSIAVGALLYQETPLDIIFSIEPMSVNKTLSFLKERAKFSMSNLVKNELLEYQELVKTKRLSMQKFALNVLIKAPSLEDLDAQTSLILGLLFKENLVGVIETFGLKGGYFSFFPERIHLNHRLRFLTSKALACLMVFERQNLGFKANSWGNSPLSVFKNLDYSPFLFNFHNQEVSHNNAKEIARVNGHTLVIGATGSGKSTLISYLMMSALKYQNMRLLAFDRMQGLYSFTEFFKGHYHDGQSFSINPFCLEPNLQNLEFLQSFFLSMLDLAPSRDKEALEDMNAISGAIKSLYETLYPKDFSLLDFKETLKRTSSNQLGLSLEPYLNNPLFNALNDAFNSNAFLNVINLDAITQNPKDLGLLAYYLFYKILEESRKNDSGFLVFLDEFKSYVENDLLNTKINALITQARKANGVVVLALQDIYQLSGVKNAHSFLSNMGTLILYPQKNARELKHNFNVPLSETEISFLENTPLYARQVLVKNLGNGSSNMIDVSLEGLGCYLKIFNSDSSHVNKVKALQKDYPTEWREKLLKS

SEQ ID NO: 9154 - protein, 341 aa, Helicobacter pylori
  misc_feature (B) LOCATION 1...341
  hypothetical: YES
MENFKLINFFTGQNDAGKTNLLEALYTNTGLCDPTANQVSLPPEHAVNISEFRKIKLDADNLKTFFYQGNTANPISIRTEFEHATIPLTIQYPTQTSYSKDINLNSDDAHMTNLINTTITKPQLQFSYNPSLSPMTMTYEFERQNLGLIHSNLDKIAQTYKENAMFIPIELSIVNSLKALENLQLASKEKELIEILQCFNPNILNANTIRKSVYIQIKDENTPLEESPKRLLNLFGWGFIKFFIMVSILIDNRVKYLFIDEIESGLHHTKMQEFLKALFKLAQKLQIQIFATTHNKEFLLNAINTISDNETGVFKDIALFELEKESASDFIRHSYSMLEKA

SEQ ID NO: 9155 - protein, 367 aa, Helicobacter pylori
  misc_feature (B) LOCATION 1...367
  hypothetical: YES
MIKSVEIENYKNFEHLKMENFKLINFFTGQNDAGKTNLLEALYTNTGLCDPTANQVSLPPEHAVNISEFRKIKLDADNLKTFFYQGNTANPISIRTEFEHATIPLTIQYPTQTSYSKDINLNSDDAHMTNLINTTITKPQLQFSYNPSLSPMTMTYEFERQNLGLIHSNLDKIAQTYKENAMFIPIELSIVNSLKALENLQLASKEKELIEILQCFNPNILNANTIRKSVYIQIKDENTPLEESPKRLLNLFGWGFIKFFIMVSILIDNRVKYLFIDEIESGLHHTKMQEFLKALFKLAQKLQIQIFATTHNKEFLLNAINTISDNETGVFKDIALFELEKESASGFIRHSYSMLEKALYRGMEVRG

SEQ ID NO: 9156 - protein, 381 aa, Helicobacter pylori
  misc_feature (B) LOCATION 1...381
  hypothetical: YES
TWRYQLGSLKGKIQMIKSVEIENYKNFEHLKMENFKLINFFTGQNDAGKTNLLEALYTNTGLCDPTANQVSLPPEHAVNISEFRKIKLDADNLKTFFYQGNTANPISIRTEFEHATIPLTIQYPTQTSYSKDINLNSDDAHMTNLINTTITKPQLQFSYNPSLSPMTMTYEFERQNLGLIHSNLDKIAQTYKENAMFIPIELSIVNSLKALENLQLASKEKELIEILQCFNPNILNANTIRKSVYIQIKDENTPLEESPKRLLNLFGWGFIKFFIMVSILIDNRVKYLFIDEIESGLHHTKMQEFLKALFKLAQKLQIQIFATTHNKEFLLNAINTISDNETGVFKDIALFELEKESASGFIRHSYSMLEKALYRGMEVRG

SEQ ID NO: 9157 - protein, 54 aa, Helicobacter pylori
  misc_feature (B) LOCATION 1...54
  hypothetical: YES
SYFRPNASSGEKPQFLDELLLRPMSAKLLEPTFMEKKGWVDREKLLDVSGRGRA

SEQ ID NO: 9158 - protein, 56 aa, Helicobacter pylori
  misc_feature (B) LOCATION 1...56
  hypothetical: YES
IGCGFCFERGSARQRPKSQRKEALNQVRKLVREVGEEARFDLILDRTQAAVKNRNF

SEQ ID NO: 9159 - protein, 91 aa, Helicobacter pylori
  misc_feature (B) LOCATION 1...91
  hypothetical: YES
RNKDKREYFENATAQIGAKLLVCDIREQFFNDVLFKPKYGYGKYFNPCIDCHANMFRNAFYKMLELDADFVLSGEVLGNALNPKGKKRSIR

SEQ ID NO: 9160 - protein, 154 aa, Helicobacter pylori
  misc_feature (B) LOCATION 1...154
  hypothetical: YES
GACLGNCQMIKDYGLKYYEKPGGGCLLTDIQVSNKIKNLKEYREMVFEDGVIVKNGRYFVLPHNARLVVARNEEENHKLDIEHPLMDKIELLGCKGPLSLVDKNASQEDKELAGRIALGYAKTLKNQAYLIQIGNEKRELYPLDKENAREYLFA

SEQ ID NO: 9161 - protein, 350 aa, Helicobacter pylori
  misc_feature (B) LOCATION 1...350
  hypothetical: YES
MKQIKALALFSGGLDSLLSMKLLIDQGIEVTALHFNIGFGGNKDKREYFENATAQIGAKLLVCDIREQFFNDVLFKPKYGYGKYFNPCIDCHANMFRNAFYKMLELDADFVLSGEVLGQRPKSQRKEALNQVRKLVREVGEEARFDLILDRTQASGEKPQFLDELLLRPMSAKLLEPTFMEKKGWVDREKLLDVSGRGRARQLQMIKDYGLKYYEKPGGGCLLTDIQVSNKIKNLKEYREMVFEDGVIVKNGRYFVLPHNARLVVARNEEENHKLDIEHPLMDKIELLGCKGPLSLVDKNASQEDKELAGRIALGYAKTLKNQAYLIQIGNEKRELYPLDKENAREYLFA

SEQ ID NO: 9162 - protein, 253 aa, Helicobacter pylori
  misc_feature (B) LOCATION 1...253
  hypothetical: YES
MAYKYDRDLEFLKQLESSDLLDLFEVLVFGKDGEKRHNEKLTSSIEYKRHGDDYAKYAERIAEELQYYGSNSFASFIKGEGVLYKEILCDVCDKLKVNYNKKTETTLIEQNMLSKILERSLEEMDDEEVKEMCDELSIKNTDNLNRQALSAATLTLFKMGGFKSYQLAVIVANAVAKTILGRGLSLAGNQVLTRTLSFLTGPVGWIITGVWTAIDIAGPAYRVTIPACIVVATLRLKTQQANEDKKSLQIESV

SEQ ID NO: 9163 - protein, 253 aa, Helicobacter pylori; identical to SEQ ID NO: 9162
  misc_feature (B) LOCATION 1...253
  hypothetical: YES

SEQ ID NO: 9164 - protein, 256 aa, Helicobacter pylori
  misc_feature (B) LOCATION 1...256
  hypothetical: YES
RNNMAYKYDRDLEFLKQLESSDLLDLFEVLVFGKDGEKRHNEKLTSSIEYKRHGDDYAKYAERIAEELQYYGSNSFASFIKGEGVLYKEILCDVCDKLKVNYNKKTETTLIEQNMLSKILERSLEEMDDEEVKEMCDELSIKNTDNLNRQALSAATLTLFKMGGFKSYQLAVIVANAVAKTILGRGLSLAGNQVLTRTLSFLTGPVGWIITGVWTAIDIAGPAYRVTIPACIVVATLRLKTQQANEDKKSLQIESV

SEQ ID NO: 9165 - protein, 89 aa, Helicobacter pylori
  misc_feature (B) LOCATION 1...89
  hypothetical: YES
RIKMISQMLIQATLETLYMVFVASFLAVVFGLPLGVLLLVSKKGHLLNKPLLHKILDTSINTTRSFPFIILIILLLPLSALFDWHKHWI

SEQ ID NO: 9166 - protein, 147 aa, Helicobacter pylori
  misc_feature (B) LOCATION 1...147
  hypothetical: YES
LFCSCLYQRFLIGTSIGSSASIIPLAISAIPFVVKLFENSLMEVEHGKIETTLSLGASHLEVIKMMLLESLPSLVNNITITLISLIGYSAMAGALGAGGLGDLAIRIGYQSYRGDVLFYAVVVIIVLVQIIQSAGDYVVKRLRKNKY

SEQ ID NO: 9167 - protein, 215 aa, Helicobacter pylori
  misc_feature (B) LOCATION 1...215
  hypothetical: YES
MISQMLIQATLETLYMVFVASFLAVVFGLPLGVLLLVSKKGHLLNKPLLHKILDTSINTTRSFPFIILIILLLPLSRFLIGTSIGSSASIIPLAISAIPFVAKLFENSLMEVEHGKIETTLSLGASHLEVIKMMLLESLPSLVNNITITLISLIGYSAMAGALGAGGLGDLAIRIGYQSYRGDVLFYAVVVIIVLVQIIQSAGDYVVKRLRKNKY

SEQ ID NO: 9168 - protein, 91 aa, Helicobacter pylori
  misc_feature (B) LOCATION 1...91
  hypothetical: YES
MSDEITQENELEINSNNQNQEPKEVEKMPLNNIQKAKKLKNHANLIVRRTDELDKVINKRESLQREFKRRIKHLDNKIETLSNNIEELKRK

SEQ ID NO: 9169 - protein, 105 aa, Helicobacter pylori
  misc_feature (B) LOCATION 1...105
  hypothetical: YES
RSTTLIYFNFKEPMMSDEITQENELEINSNNQNQEPKEVEKMPLNNIQKAKKLKNHANLIVRRTDELDKVINKRESLQREFKRRIKHLDNKIETLSNNIEELKRK

SEQ ID NO: 9170 - protein, 405 aa, Helicobacter pylori
  misc_feature (B) LOCATION 1...405
  hypothetical: YES
AHANRTIIHRIDDSIAQRVDNAIRPMRLVRGFAPLYLTLPKRSFNAPKKILALGAEQKGHFSLLDSETSVLLLSPFCGDLSVLENEKHFKETLNFFLKTYDFKPTLLACDEHQNYTTTKMAFDFNTPLLQVQHHHAHFLASVLDALLQDPHLNHPFIGIVWDGSGAYENKIYGAECFVGDLERIEEVARFEEFWLLGGQKAIKEPRRLVLEIALKHQLNKLLKRVQKHFKEDELGIFKQMHDKKIQSVATNSIGRLFDIVAFSLGVVGTISFEAESGQVLENLALQSDEIAFYPFEIKNSVVRLKEFYQAFEKDLGVLEPKRIAKKFFNSLVEIITALIAPFKGHVVVCSGGVFCNQLLCEQLAKRLKKLQREYFFHKHFPPNDSSIPVGQALMAYFNPTIIKKG

SEQ ID NO: 9171 - protein, 412 aa, Helicobacter pylori
  misc_feature (B) LOCATION 1...412
  hypothetical: YES
YFNQTAWEFALCNDATLLNKITLFGVVQGVGMRPFVYILAQKLGLVGFVRNAQAALEIVLPAHKTESFLNALKKGLPPLALVEKIIISPYDKALHFNDFRILESKNHPLNLLSQIPKDLGVCEDCLCEIRDKNSPYFHYAFNSCAKCGARYSLLNAMPYDRENSALKPFKLCKFCASVYKDAHNKRFHIQGISCKKCGIALNYKRFKNDDALLECAKDIQKGKIIALKGLGGFALLCDARNFKTIERLRLLKNRPLKPFALMFKDLNAAKQHAFLNALECESLNSVSAPILLARKKPDTQLAPNIAKNSPFYGVILPYTPLHALLLDLLDSPIVFTSANFSSLPLASDEKEIDSLHFIFDFKLTPTAPSSTGLMIASRSAWIMPFAPCVWLEGLPPFTSLYPNALLMRPKRF

SEQ ID NO: 9172 - protein, 757 aa, Helicobacter pylori
  misc_feature (B) LOCATION 1...757
  hypothetical: YES
LCNDATLLNKITLFGVVQGVGMRPFVYILAQKLGLVGFVRNAQAALEIVLPAHKTESFLNALKKGLPPLALVEKIIISPYDKALHFNDFRILESKNHPLNLLSQIPKDLGVCEDCLCEIRDKNSPYFHYAFNSCAKCGARYSLLNAMPYDRENSALKPFKLCKFCASVYKDAHNKRFHIQGISCKKCGIALNYKRFKNDDALLECAKDIQKGKIIALKGLGGFALLCDARNFKTIERLRLLKNRPLKPFALMFKDLNAAKQHAFLNALECESLNSVSAPILLARKKPDTQLAPNIAKNSPFYGVILPYTPLHALLLDLLDSPIVFTSANFSSLPLASDEKEIDSLHFIFDFKLTHNRTIIHRIDDSIAQRVDNAIRPMRLVRGFAPLYLTLPKRSFNAPKKILALGAEQKGHFSLLDSETSVLLLSPFCGDLSVLENEKHFKETLNFFLKTYDFKPTLLACDEHQNYTTTKMAFDFNTPLLQVQHHHAHFLASVLDALLQDPHLNHPFIGIVWDGSGAYENKIYGAECFVGDLERIEEVARFEEFWLLGGQKAIKEPRRLVLEIALKHQLNKLLKRVQKHFKEDELGIFKQMHDKKIQSVATNSIGRLFDIVAFSLGVVGTISFEAESGQVLENLALQSDEIAFYPFEIKNSVVRLKEFYQAFEKDLGVLEPKRIAKKFFNSLVEIITALIAPFKGHVVVCSGGVFCNQLLCEQLAKRLKKLQREYFFHKHFPPNDSSIPVGQALMAYFNPTIIKKG

SEQ ID NO: 9173 - protein, 44 aa, Helicobacter pylori
  misc_feature (B) LOCATION 1...44
  hypothetical: YES
DNQFLKNERLLLLVSYFLNAIDPFNLGVLLSRFQIKNGRLYLIK

SEQ ID NO: 9174 - protein, 186 aa, Helicobacter pylori
  misc_feature (B) LOCATION 1...186
  hypothetical: YES
LLLVSRFLNAIDPFNLGVLLSRFQIKNGCIYGVCSYKVSKFTPGYEESKARVLNALNILSKHQIWQSNQESVTKVKGTFVFILENDLHLDENSFYKKLLNLIIDNDFFNRSHLVTPSNGTNSHPELHRSITPREAARIQSFSDDYIFYGNKTSVCKQIGNAVPPLLALALGKAILKSARNDTNPSR

SEQ ID NO: 9175 - protein, 194 aa, Helicobacter pylori
  misc_feature (B) LOCATION 1...194
  hypothetical: YES
SFKKNERLLLLVSRFLNAIDPFNLGVLLSRFQIKNGCIYGVCSYKVSKFTPGYEESKARVLNALNILSKHQIWQSNQESVTKVKGTFVFILENDLHLDENSFYKKLLNLIIDNDFFNRSHLVTPSNGTNSHPELHRSITPREAARIQSFSDDYIFYGNKTSVCKQIGNAVPPLLALALGKAILKSARNDTNPSR

SEQ ID NO: 9176 - protein, 141 aa, Helicobacter pylori
  misc_feature (B) LOCATION 1...141
  hypothetical: YES
MESNQSLPMALISCSPNAKGADIKGYNGLVGELIERNFQRYGVPLLLSTLTNGLLIGITSALNNRGNKEEVTNFFGDYLLLQLMRQSGMGINQVVNQILRDKSKIAPIVVIREGSRVFISPNTDIFFPIPRENEVIAEFLK

SEQ ID NO: 9177 - protein, 375 aa, Helicobacter pylori
  misc_feature (B) LOCATION 1...375
  hypothetical: YES
NKWIKGAVVFVGGFATITTFSLIYHQKPKAPLNNQPSLLNDDEVKYPLQDYTFTQNPQPTNTESSKDATIKALQEQLKAALKALNSKEMNYSKEETFTSPPMDPKTTPPKKDFSPKQLDLLASRITPFKQSPKNYEENLIFPVDNPNGIDSFTNLKEKDIATNENKLLRTITADKMIPAFLITPISSQIAGKVIAQVESDIFASMGKAVLIPKGSKVIGYYSNNNKMGEYRLDIVWSRIITPHGINIMLTNAKGADIKGYNGLVGELIERNFQRYGVPLLLSTLTNGLLIGITSALNNRGNKEEVTNFFGDYLLLQLMRQSGMGINQVVNQILRDKSKIAPIVVIREGSRVFISPNTDIFFPIPRENEVIAEFLK

SEQ ID NO: 9178 - protein, 376 aa, Helicobacter pylori
  misc_feature (B) LOCATION 1...376
  hypothetical: YES
VNKWIKGAVVFVGGFATITTFSLIYHQKPKAPLNNQPSLLNDDEVKYPLQDYTFTQNPQPTNTESSKDATIKALQEQLKAALKALNSKEMNYSKEETFTSPPMDPKTTPPKKDFSPKQLDLLASRITPFKQSPKNYEENLIFPVDNPNGIDSFTNLKEKDIATNENKLLRTITADKMIPAFLITPISSQIAGKVIAQVESDIFASMGKAVLIPKGSKVIGYYSNNNKMGEYRLDIVWSRIITPHGINIMLTNAKGADIKGYNGLVGELIERNFQRYGVPLLLSTLTNGLLIGITSALNNRGNKEEVTNFFGDYLLLQLMRQSGMGINQVVNQILRDKSKIAPIVVIREGSRVFISPNTDIFFPIPRENEVIAEFLK

SEQ ID NO: 9179 - protein, 95 aa, Helicobacter pylori
  misc_feature (B) LOCATION 1...95
  hypothetical: YES
RFSQIHRSRYENIAQMPSVMNVGSGVDYSIEEYYEKVAQVLDYKGVFVKDSSKPVGMQQKLMDISKQKALKWELEIPLEQGIKEAYEYYLKLLEV

SEQ ID NO: 9180 - protein, 214 aa, Helicobacter pylori
  misc_feature (B) LOCATION 1...214
  hypothetical: YES
GIFMNEIILITGAYGMVGQNTALYFKKNKPDVTLLTPKKSELYLLDKDNVQAYLKEYKPTGIIHCAGRVGGIVANMNDLSTYMVENLLMGLYLFSSALDLGVKKAINLASSCAYPKYAPNPLKESDLLNGSLEPTNEGYALAKLSVMKYCEYVSAEKGVFYKTLVPCNLYGEFDKFEEKIAHMIPGLIARMHTAKLKNEKNFAMWGDGTAEESI

SEQ ID NO: 9181 - protein, 310 aa, Helicobacter pylori
  misc_feature (B) LOCATION 1...310
  hypothetical: YES
MNEIILITGAYGMVGQNTALYFKKNKPDVTLLTPKKSELYLLDKDNVQAYLKEYKPTGIIHCAGRVGGIVANMNDLSTYMVENLLMGLYLFSSALDLGVKKAINLASSCAYPKYAPNPLKESDLLNGSLEPTNEGYALAKLSVMKYCEYVSAEKGVFYKTLVPCNLYGEFDKFEEKIAHMIPGLIARMHTAKLKNEKNFAMWGDGTARREYLNAKDLARFIALAYENIAQMPSVMNVGSGVDYSIEEYYEKVAQVLDYKGVFVKDSSKPVGMQQKLMDISKQKALKWELEIPLEQGIKEAYEYYLKLLEV

SEQ ID NO: 9182 - protein, 80 aa, Helicobacter pylori
  misc_feature (B) LOCATION 1...80
  hypothetical: YES
MMFELTKKTKFDGEMIGYTEELLTFLVRDFFNGIFKSKVIPKMPIFCGDVKCEDFNALRSLVYLSVLELEETINPNKIPF

SEQ ID NO: 9183 - protein, 86 aa, Helicobacter pylori
  misc_feature (B) LOCATION 1...86
  hypothetical: YES
LSLNKKMMFELTKKTKFDGEMIGYTEELLTFLVRDFFNGIFKSKVIPKMPIFCGDVKCEDFNALRSLVYLSVLELEETINPNKIPF

SEQ ID NO: 9184 - protein, 149 aa, Helicobacter pylori
  misc_feature (B) LOCATION 1...149
  hypothetical: YES
KKRKYMRFRRVKKHKNKHNKEHTSMDLQQIDELEKKFEEQEEQAQDTPLKQEPSTKEVKIPKKRGRKKSLLDEDKKKSFNIAFSPCVIKELNEFLLEFGSFKETRSTFIEEALIRHLKHRKNTQEQKLLKQLERLQNKEKGNNENNELE

SEQ ID NO: 9185 - protein, 178 aa, Helicobacter pylori
  misc_feature (B) LOCATION 1...178
  hypothetical: YES
KSSSKSLEYEVLTICVRTHSVILHLFSLISILCAMLQRIENKFSPIDYESTIPSDFKPIDEEEYEDDLEWLNEEKEDRLFNYYLFLNGIKESDVEEVFNESVEIYDECLIEIAQNVLKDKFSYDIDLLQVLVKGYAKEIREFLSYKPIKEIKDFKDKDTALYISLGKDYDDEIETVSK

SEQ ID NO: 9186 - protein, 231 aa, Helicobacter pylori
  misc_feature (B) LOCATION 1...231
  hypothetical: YES
KDYKTKKRAIMKTMNLNEFFTHKIIYKDTPLKFKDTLEQEISQASLVEKLILANILANMVFAKISNENAPKILISRLMCKFSPIDYESTIPSDFKPIDEEEYEDDLEWLNEEKEDRLFNYYLFLNGIKESDVEEVFNESVEIYDECLIEIAQNVLKDKFSYDIDLLQVLVKGYAKEIREFLSYKPIKEIKDFKDKDTALYISLGKDYDKEKEPFSKKLQQCFKEILESKGI

SEQ ID NO: 9187 - protein, 339 aa, Helicobacter pylori
  misc_feature (B) LOCATION 1...339
  hypothetical: YES
MDLQQIDELENKFEEQEEQAQDTPLKQEPSTKEVKIPKKRGRKKSLLDEDKKKSFNIAFSPCVIKELNEFLLEFGSFKETRSTFIEEALIRHLKHRKNTQEQKLLKQLERLQNKEKGIMKTMNLNEFFTHKIIYKDTPLKFKDTLEQEISQASLVEKLILANILANMVFAKISNENAPKILISRLMCKFSPIDYESTIPSDFKPIDEEEYEDDLEWLNEEKEDRLFNYYLFLNGIKESDVEEVFNESVEIYDECLIEIAQNVLKDKFSYDIDLLQVLVKGYAKEIREFLSYKPIKEIKDFKDKDTALYISLGKDYDKEKEPFSKKLQQCFKEILESKGI

SEQ ID NO: 9188 - protein, 84 aa, Helicobacter pylori
  misc_feature (B) LOCATION 1...84
  hypothetical: YES
KTINKLRIIMKPTNEPKKPFFQSPIVLAVLGGILLIFFLRSFNSDGSFSDNFLASSTKNVSYHEIKQLISNNEVENVSIGQTLI

SEQ ID NO: 9189 - protein, 111 aa, Helicobacter pylori
  misc_feature (B) LOCATION 1...111
  hypothetical: YES
MKPTNEPKKPFFQSPIVLAVLGGILLIFFLRSFNSDGSFSDNFLASSTKNVSYHEIIQLISNHEVGNVSIGQTLIKASHKEGNNRVIYIAKRVLIYLSAFVRREKNQLFWF

SEQ ID NO: 9190 - protein, 135 aa, Helicobacter pylori
  misc_feature (B) LOCATION 1...135
  hypothetical: YES
RVPDLTLVALLDEKKINYSGFDESNFFTDMLGWLMPILVILGLWMFMANRMQKNMGGGIFGMGSAKKLINAEKPNVRFNDMAGNEEAKEEVVEIVDFLKYPERYANLGAKIPKGVLLVGPPGTGKTLLAKAVAGE

SEQ ID NO: 9191 - protein, 136 aa, Helicobacter pylori
  misc_feature (B) LOCATION 1...136
  hypothetical: YES
RVPDLTLVALLDEKKINYSGFDESNFFTDMLGWLMPILVILGLWMFMANRMQKNMGGGIFGMGSAKKLINAEKPNVRFNDMAGNEEAKEEVVEIVDFLKYPERYANLGAKIPKGVLLVGPPGTGKTLLAKAVAGEA

SEQ ID NO: 9192 - protein, 245 aa, Helicobacter pylori
  misc_feature (B) LOCATION 1...245
  hypothetical: YES
SRAFSGRNNQKEVKQQHLKEAVERGIAGLEKKSRRISPKEKKIVAYHESGHAVISEMTKGSTRVNKVSIIPRGMAALGYTLNTPEENKYLMQKHELIAEIDVLLGGRAAEEVFLEEISTGASNDLERATDIIKGMVSYYGMSSVSGLMVLEKQRNAFLGGGYGSSREFSEKTAEEMEPCIKNLLEERYQHVKQTLSDYREAIEIMVKELFDKEVITGERVREIISEYEAANNLESRLIPLEEQAS

SEQ ID NO: 9193 - protein, 257 aa, Helicobacter pylori
  misc_feature (B) LOCATION 1...257
  hypothetical: YES
VPLLDEKKINYSGFDESNFFTDMLGWLMPILVILGLWMFMANRMQKNMGGGIFGMGSAKKLINAEKPNVRFNDMAGNEEAKEEVVEIVDFLKYPERYANLGAKIPKGVLLVGPPGTGKTLLAKAVAGEAHVPFFSMGGSSFIEMFVGLGASRVRDLFETAKKQAPSIIFIDEIDAIGKSRAAGGMISGNDEREQTLNQLLAEMDGFGSENAPVIVLAATNRPEILDPALMRPGRFDRQVLVDKPDFNGRVEILKVPY

SEQ ID NO: 9194 - protein, 275 aa, Helicobacter pylori
  misc_feature (B) LOCATION 1...275
  hypothetical: YES
VKLANDVNLQEVAKLTAGLAGADLANIINEAALLAGRNNQKEVKQQHLKEAVERGIAGLEKKSRRISPKEKKIVAYHESGHAVISEMTKGSTRVNKVSIIPRGMAALGYTLNTPEENKYLMQKHELIAEIDVLLGGRAAEEVFLEEISTGASNDLERATDIIKGMVSYYGMSSVSGLMVLEKQRNAFLGGGYGSSREFSEKTAEEMDLFIKNLLEERYQHVKQTLSDYREAIEIMVKELFDKEVITGERVREIISEYEAANNLESRLIPLEEQAS

SEQ ID NO: 9195 - protein, 632 aa, Helicobacter pylori
  misc_feature (B) LOCATION 1...632
  hypothetical: YES
MKPTNEPKKPFFQSPIVLAVLGGILLIFFLRSFNSDGSFSDNFLASSTKNVSYHEIKQLISNNEVENVSIGQTLIKASHKEGNNRVIYIAKRVPDLTLVPLLDEKKINYSGFSESNFFTDMLGWLMPILVILGLWMFMANRMQKNMGGGIFGMGSAKKLINAEKPNVRFNDMAGNEEAKEEVVEIVDFLKYPERYANLGAKIPKGVLLVGPPGTGKTLLAKAVAGEAHVPFFSMGGSSFIEMFVGLGASRVRDLFETAKKQAPSIIFIDEIDAIGKSRAAGGMISGNDEREQTLNQLLAEMDGFGSENAPVIVLAATNRPEILDPALMRPGRFDRQVLVDKPDFNGRVEILKVHIKGVKLANDVNLQEVAKLTAGLAGADLANIINEAALLAGRNNQKEVKQQHLKEAVERGIAGLEKKSRRISPKEKKIVAYHESGHAVISEMTKGSTRVNKVSIIPRGMAALGYTLNTPEENKYLMQKHELIAEIDVLLGGRAAEEVFLEEISTGASNDLERATDIIKGMVSYYGMSSVSGLMVLEKQRNAFLGGGYGSSREFSEKTAEEMDLFIKNLLEERYQHVKQTLSDYREAIEIMVKELFDKEVITGERVREIISEYEAANNLESRLIPLEEQAS

SEQ ID NO: 9196 - protein, 307 aa, Helicobacter pylori
  misc_feature (B) LOCATION 1...307
  hypothetical: YES
MPKKCRHLLQTSDLSLDEIKLLLNKASVYANDFNAVSLETREKMQDKIIVALFFENSTRTVSSFEIASLRLGAKIVKLNMQTSSTSKGETLIDTFKNIHAMQPDAIITRHAFSSAPFKLAEFSQCPLINAGSGTSAHPTQALLDLLTLYRHFGSLENLKGKKIAFIGDVKNSRVANSNIKLLQRLGLEIMLCAPSSMLPITPLKTTHNIEEAIGFADILMSLRTQTERHNAPIFASLKDYGNAYCITQKRLETHAKNKEVIILHPGPVHRDIDIESAVLEDKRSKVLEQVKNGVAMRMAVLEFLLLD

SEQ ID NO: 9197 - protein, 312 aa, Helicobacter pylori
  misc_feature (B) LOCATION 1...312
  hypothetical: YES
LKGGFMPKKCRHLLQTSDLSLDEIKLLLNKASVYANDFNAVSLETREKMQDKIIVALFFENSTRTVSSFEIASLRLGAKIVKLNMQTSSTSKGETLIDTFKNIHAMQPDAIITRHAFSSAPFKLAEFSQCPLINAGSGTSAHPTQALLDLLTLYRHFGSLENLKGKKIAFIGDVKNSRVANSNIKLLQRLGLEIMLCAPSSMLPITPLKTTHNIEEAIGFADILMSLRTQTERHNAPIFASLKDYGNAYCITQKRLETHAKNKEVIILHPGPVHRDIDIESAVLEDKRSKVLEQVKNGVAMRMAVLEFLLLD

SEQ ID NO: 9198 - protein, 78 aa, Helicobacter pylori
  misc_feature (B) LOCATION 1...78
  hypothetical: YES
GNECVHLGGINLCGVYDYIARKRQDFAPDIDTALKKRDSSKPTILLAHQPNQIRSLKESPLYRSGPFRAYPCRANLPL

SEQ ID NO: 9199 - protein, 87 aa, Helicobacter pylori
  misc_feature (B) LOCATION 1...87
  hypothetical: YES
PTSPTKLEASKKAHSIDLVLSGHTHAGQIFPFSLLVKLAQTYLHGLYKHSGTTQIYVSSGAGYWGIPLRFLAPSEIAYLRLLPKNQA

SEQ ID NO: 9200 - protein, 195 aa, Helicobacter pylori
  misc_feature (B) LOCATION 1...195
  hypothetical: YES
GFLSSLSAGEATFVFYRNVMPSHLFVLTSACSYVSFIAFVFSLSFYGFSYSVKKIDFLPSRRKGLKNFLRIGFYLALLGYFWRGFYEGLARPKIKETPIYLDKLDKELKIILLTDMHVGSLLQKDFVNYIVEEVNQKEVDMVLIGGDLVDENIEKVKSFLLPLNNLKSTHGTFYVPGNHEYYHGIEPILSFLNTT

SEQ ID NO: 9201 - protein, 370 aa, Helicobacter pylori
  misc_feature (B) LOCATION 1...370
  hypothetical: YES
MLISIAFLLVLCLLNYSSFRMLKSFLTLKKISRYAYLGFFILLSAGEATFVFYRNVMPSHLFVLTSACSFVSFIAFVFSLSFYGFSYSVEKIDFLPSRRKGLKNFLRIGFYLALLGYFWRGFYEGLARPKIKETPIYLDKLDKELKIILLTDMHVGSLLQKDFVNYIVEEVNQKEVDMVLIGGDLVDENIEKVKSFLLPLNNLKSTHGTFYVPGNHEYYHGIEPILSFLNTLDMTILGNECVHLGGINLCGVYDYFARKRQDFAPDIDKALKKRDSSKPTILLAHQPKQIRSLKESHSIDLVLSGHTHAGQIFPFSLLVKLAQTYLHGLYKHSGTTQIYVSSGAGYWGIPLRFLAPSEIAYLRLLPKNQA

SEQ ID NO: 9202 - protein, 135 aa, Helicobacter pylori
  misc_feature (B) LOCATION 1...135
  hypothetical: YES
MLILGHPLIPSARFVFIKNTDAIHSSANNDIVCFEANPKNLELAQYCCENGVHFSVIFLSHKIETDTFFLFNAFKPLYCIFKDIKQAILAQQHATNYLLDSKILFSMDFNDTESWEICAKNQIDGVISKDSLLLK

SEQ ID NO: 9203 - protein, 135 aa, Helicobacter pylori; identical to SEQ ID NO: 9202
  misc_feature (B) LOCATION 1...135
  hypothetical: YES

SEQ ID NO: 9204 - protein, 138 aa, Helicobacter pylori
  misc_feature (B) LOCATION 1...138
  hypothetical: YES
GVNMLILGHPLIPSARFVFIKNTDAIHSSANNDIVCFEANPKNLELAQYCCENGVHFSVIFLSHKIETDTFFLFNAFKPLYCIFKDIKQAILAQQHATNYLLDSKILFSMDFNDTESWEICAKNQIDGVISKDSLLLK

SEQ ID NO: 9205 - protein, 234 aa, Helicobacter pylori
  misc_feature (B) LOCATION 1...234
  hypothetical: YES
MLSAHQPFKNYPDLIKKELQEHNAYASVASGVPAMCDGITQGYEGMELSLFSRDVIALSTXVGLSHNVFDGAFFLGVCDKIVPGLLIGALSFGNLASVFVPSGPMVSGIENYKKAKARQDFAMGKINREELLKVEMQSYHDVGTCTFYGTANSNQMMMEFMGLHVANSSFINPNNPLRKVLVEESAKRLASGKVLPLAKLIDEKSILNALIGLMATGGSTNHTLHLIAIADLVG

SEQ ID NO: 9206 - protein, 608 aa, Helicobacter pylori
  misc_feature (B) LOCATION 1...608
  hypothetical: YES
MPKHSLEQIKEKITERSKKTRELYLENTFNPKNQPKIESLGCANIAHVTASMPEHLKMPLGSHKRKHFAIITAYNDMLSAHQPFKNYPDLIKKELQEHNAYASVASGVPAMCDGITQGYEGMELSLFSRDVIALSTAVGLSHNVFDGAFFLGVCDKIVPGLLIGALSFGNLASVFVPSGPMVSGIENYKKAKARQDFAMGKINREELLKVEMQSYHDVGTCTFYGTANSNQMMMEFMGLHVANSSFINPNNPLRKVLVEESAKRLASGKVLPLAKLIDEKSILNALIGLMATGGSTNHTLHLIAIARSCGVILNWDDFDAISNLIPLLAKVYPNGSADVNAFEACGGLAFVIKELLKEGLLFEDTHTIMDTETQKGMQNYTKTPFLENDQLVYKDAVSHSLNTDILRPVSEPFAANGGLKILKGNLGRAVIKISAIKDEHRKVKARAIVFKTQSEFLERFKNKELERDFVAVLPFQGPKSNGMPELHKLTTNLGALQDMGYKVALVTDGRMSGASGKVPSAIHLSPEGALNGAIIKIKDGDLIELDAPNNALNVLEKDFEKRGINPLFLETLENLEKPTFGLGRELFTSLRLNANTAEEGGMSFGIKV

SEQ ID NO: 9207 - protein, 615 aa, Helicobacter pylori
  misc_feature (B) LOCATION 1...615
  hypothetical: YES
ILIEGVFMPKHSLEQIKEKITERSKKTRELYLENTFNPKNQPKIESLGCANIAHVTASMPEHLKMPLGSHKRKHFAIITAYNDMLSAHQPFKNYPDLIKKELQEHNAYASVASGVPAMCDGITQGYEGMELSLFSRDVIALSTAVGLSHNVFDGAFFLGVCDKIVPGLLIGALSFGNLASVFVPSGPMVSGIENYKKAKARQDFAMGKINREELLKVEMQSYHDVGTCTFYGTANSNQMMMEFMGLHVANSSFINPNNPLRKVLVEESAKRLASGKVLPLAKLIDEKSILNALIGLMATGGSTNHTLHLIAIARSCGVILNWDDFDAISNLIPLLAKVYPNGSADVNAFEACGGLAFVIKELLKEGLLFEDTHTIMDTETQKGMQNYTKTPFLENDQLVYKDAVSHSLNTDILRPVSEPFAANGGLKILKGNLGRAVIKISAIKDEHRKVKARAIVFKTQSEFLERFKNKELERDFVAVLPFQGPKSNGMPELHKLTTNLGALQDMGYKVALVTDGRMSGASGKVPSAIHLSPEGALNGAIIKIKDGDLIELDAPNNALNVLEKDFEKRGINPLFLETLENLEKPTFGLGRELFTSLRLNANTAEEGGMSFGIKV

SEQ ID NO: 9208 - protein, 179 aa, Helicobacter pylori
  misc_feature (B) LOCATION 1...179
  hypothetical: YES
MNYPNLPNSALXISEQPEVKEITNELLKQLQNALRSNAHFSEQVELSLKCIVRILEVLLSLDFFKNANEIDSSLRNSIEWLTNAGESLKLKMKEYERFFSEFNTSMHANEQEVTNTLNANAENIKSXIKXLENQLIETTTRLLTSYQIFLNQARDNANNQITKNKTXSLEAITQAKNNS

SEQ ID NO: 9209 - protein, 267 aa, Helicobacter pylori
  misc_feature (B) LOCATION 1...267
  hypothetical: YES
MNYPNLPNSALEISEQPEVKEITNELLKQLQNALRSNAHFSEQVELSLKCIVRILEVLLSLDFFKNANEIDSSLRNSIEWLTNAGESLKLKMKEYERFFSEFNTSMHANEQEVTNTLNANAENIKSEIKKLENQLIETTTRLLTSYQIFLNQARDNANNQITKNKTQSLEAITQAKNNANNEISNNQTQAITNITEAKTNANNEISNNQTQAITNINEAKESATTQINANKQEAINNITQEKTQATSEITEAKKTDHYQNIDFFEFE

SEQ ID NO: 9210 - protein, 272 aa, Helicobacter pylori
  misc_feature (B) LOCATION 1...272
  hypothetical: YES
SRSVEMNYPNLPNSALEISEQPEVKEITNELLKQLQNALRSNAHFSEQVELSLKCIVRILEVLLSLDFFKNANEIDSSLRNSIEWLTNAGESLKLKMKEYERFFSEFNTSMHANEQEVTNTLNANAENIKSEIKKLENQLIETTTRLLTSYQIFLNQARDNANNQITKNKTQSLEAITQAKNNANNEISNTQTQAITNITEAKTNANNEISNNQTQAITNINEAKESATTQINANKQEAINNITQEKTQATSEITEAKKTDHYQNIDFFEFE

SEQ ID NO: 9211 - protein, 99 aa, Helicobacter pylori
  misc_feature (B) LOCATION 1...99
  hypothetical: YES
NLIPFLKKRIYQKPVRLWELEPKELKAFIEKRLKAYQNYIKDLNIDSIDGIIEGHFHLKSGTKIHSSVPIYCPLPSFYYEQSLFKVSSSLLEPSQNKDA

SEQ ID NO: 9212 - protein, 154 aa, Helicobacter pylori
  misc_feature (B) LOCATION 1...154
  hypothetical: YES
MHLKSGAVFISDAHFLPKSPHLIHTLKELLSAKPPQVFFMGDIFHVLVGYLPLDKEQQKIIDLIHALSEISQVFYFEGNHDFSMRFVFNSKVMVFERQNQPALFQYDNKRFLLAHGDLFITKAYEFYITQLTSTWARFFLTFLNLLSFKTLYPF

SEQ ID NO: 9213 - protein, 168 aa, Helicobacter pylori
  misc_feature (B) LOCATION 1...168
  hypothetical: YES
RMALFGSKSKMLETYALKSGAVFISDAHFLPKSPHLIHTLKELLSAKPPQVFFMGDIFHVLVGYLPLDKEQQKIIDLIHALSEISQVFYFEGNHDFSMRFVFNSKVMVFERQNQPALFQYDNKRFLLAHGDLFITKAYEFYITQLTSTWARFFLTFLNLLSFKTLYPF

SEQ ID NO: 9214 - protein, 252 aa, Helicobacter pylori
  misc_feature (B) LOCATION 1...252
  hypothetical: YES
MLETYALKSGAVFISDAHFLPKSPHLIHTLKELLSAKPPQVFFMGDIFHVLVGYLPLDKEQQKIIDLIHALSEISQVFYFEGNHDFSMRFVFNSKVMVFERQNQPALFQYDNKRFLLAHGDLFITKAYEFYITQLTSTWARFFLTFLNLLSFKTLYPFLKKRIYQKPVRLWELEPKELKAFIEKRLKAYQNYIKDLNIDSIDGIIEGHFHLKSGTKIHSSVPIYCPLPSFYYEQSLFKVSSSLLEPSQNKDA

SEQ ID NO: 9215 - protein, 260 aa, Helicobacter pylori
  misc_feature (B) LOCATION 1...260
  hypothetical: YES
GAKKDNEATYAFNSDKFLKWFNKVPLTEHMRLHAENEKSGEDLLKDVKVVTSGPSVKDRTSTPKEPKEKEDRFKLMFDFGDVKTNFMAIAEGSVLSERKGRLGQLMSPLVYRGNGFHASLVIMWALSFASQLKHHNDHEWAKMLENRNVDECWFETFDHMDNTDLRLFCDILGAYAQGQEETLNLTKLWAVMLPKNQKEAYFVAQLLCDGGINRYNLSCAGLTENLLKDIEVNLGLATHEEVDEYIDNLDKEEEAEKLEN

SEQ ID NO: 9216 - protein, 100 aa, Helicobacter pylori
  misc_feature (B) LOCATION 1...100
  hypothetical: YES
MELLTLDGVVEKCVFEIPSYQRGYAWQVRQWKDLWNDLEHVSKLGNKFHYMHSLTLTRLDNELEDSAFDIIDRHQRLATTLILLRLLANTTTHKDHSIIQ

SEQ ID NO: 9217 - protein, 217 aa, Helicobacter pylori; identical to SEQ ID NO: 7901
  misc_feature (B) LOCATION 1...217
  hypothetical: YES

SEQ ID NO: 9218 - protein, 115 aa, Helicobacter pylori
  misc_feature (B) LOCATION 1...115
  hypothetical: YES
LHPLCAHGQCGSEAIACLEAISVGIVPVIANSPLSATRQFALDERSLFEPNNAKDLSAKIDWWLENKLERERMQNEYAKSALNYTLENSVIQIEKVYEEAIKDFKNNPNLFKTLS

SEQ ID NO: 9219 - protein, 122 aa, Helicobacter pylori
  misc_feature (B) LOCATION 1...122
  hypothetical: YES
IVRDFKNLHPLCAHGQCGSEAIACLEAISVGIVPVIANSPLSATRQFALDERSLFEPNNAKDLSAKIDWWLENKLERERMQNEYAKSALNYTLENSVIQIEKVYEEAIKDFKNNPNLFKTLS

SEQ ID NO: 9220 - protein, 291 aa, Helicobacter pylori
  misc_feature (B) LOCATION 1...291
  hypothetical: YES
MVIVLVVDSFKDTSNGTSMTAFRFFEALKKRGHAMRVVAPHVDNLGSEEEGYYNLKERYIPLVTEISHKQHILFAKPDEKILRKAFKGADMIHTYLPFLLEKTAVKIAREMRVPYIGSFHLQPEHISYNMKLGQFSWLNTMLFSWFKSSHYRYIHHIHCPSKFIVEELEKYNYGGKKYAISNGFDPMFKFEHPQKSLFDTTPFKIAMVGRYSNEKNQSVLIKAVALSRYKQDIVLLLKGKGPDEKKIKLLAQKLGVKTEFGFVNSHELLEILKTCTLYAHTANVEAKRLRV

SEQ ID NO: 9221 - protein, 291 aa, Helicobacter pylori
  misc_feature (B) LOCATION 1...291
  hypothetical: YES
MVIVLVVDSFKDTSNGTSMTAFRFFEALKKRGHAMRVVAPHVDNLGSEEEGYYNLKERYIPLVTEISHKQHILFANPDEKILRKAFKGADMIHTYLPFLLEKTAVKIAREMRVPYIGSFHLQPEHISFNMILGQFFLIGTMNFSWFKYSHYRYIHHIHCPSKFIVEELEKYNYGGKKYAISNGFDPKFKFEHRHKILFDTTPFKIAMVGRYSNEKNQSVLIKAVALSRYKQDIVLLLKGKGPDEKKIKLLAQKLGVKTEFGFVNSHELLEILKTCTLYAHTANVEAKRLRV

SEQ ID NO: 9222 - protein, 389 aa, Helicobacter pylori
  misc_feature (B) LOCATION 1...389
  hypothetical: YES
MVIVLVVDSFKDTSNGTSMTAFRFFEALKKRGHAMRVVAPHVDNLGSEEEGYYNLKERYIPLVTEISHKQHILFAKPDEKILRKAFKGADMIHTYLPFLLEKTAVKIAREMRVPYIGSFHLQPEHISYNMKLGQFSWLNTMLFSWFKSSHYRYIHHIHCPSKFIVEELEKYNYGGKKYAISNGFDPMFKFEHPQKSLFDTTPFKIAMVGRYSNEKNQSVLIKAVALSRYKQDIVLLLKGKGPDEKKIKLLAQKLGVKTEFGFVNSHELLEILKTCTLYAHTANVESEAIACLEAISVGIVPVIANSPLSATRQFALDERSLFEPNNAKDLSAKIDWWLENKLERERMQNEYAKSALNYTLENSVIQIEKVYEEAIKDFKNNPNLFKTLS

SEQ ID NO: 9223 - protein, 276 aa, Helicobacter pylori
  misc_feature (B) LOCATION 1...276
  hypothetical: YES
MTLSQALNKAKKELSPKGFRGGLESEILLGFVLQKERVFLHTHEHLELSHEEETRFFELVGKRLNDCPIEYLLGSCDFYGRSFFVNEHVLIPRPETEILVQKALNIISQYHLKEIGEIGIGSGCVSVSLALENPNLSIYASDISPKALEVALKNIERFCLKERVFLKQTRLWDHMPTIEMLVSNPPYIARNYPLEKSVLKEPHEALFGGVKGDEILKEIVFLAAKLKIPFLVCEMGYDQLKSLKECLEFCGYDAEFYKDLSGFDRGFVGVLKSFLR

SEQ ID NO: 9224 - protein, 276 aa, Helicobacter pylori; identical to SEQ ID NO: 9223
  misc_feature (B) LOCATION 1...276
  hypothetical: YES

SEQ ID NO: 9225 - protein, 279 aa, Helicobacter pylori
  misc_feature (B) LOCATION 1...279
  hypothetical: YES
MKLNDPFTSPNKAKKELSPKGFRGGLESEILLGFVLQKERVFLHTHEHLELSHEEETRFFELVGKRLNDCPIEYLLGSCDFYGRSFFVNEHVLIPRPETEILVQKALNIISQYHLKEIGEIGIGSGCVSVSLALENPNLSIYASDISPKALEVALKNIERFCLKERVFLKQTRLWDHMPTIEMLVSNPPYIARNYPLEKSVLKEPHEALFGGVKGDEILKEIVFLAAKLKIPFLVCEMGYDQLKSLKECLEFCGYDAEFYKDLSGFDRGFVGVLKSFLR

SEQ ID NO: 9226 - protein, 502 aa, Helicobacter pylori
  misc_feature (B) LOCATION 1...502
  hypothetical: YES
MTLKPYPTKETGLASQLSGHWFFQLSLFNKTNFNPNKIWIPLEFNKRSKIKFDKDLEIYFDSHESFNISKKYLQEIDQESLKKIKQSKDFFSIQKIESKHDNNDILQLEFFENDTSFLFAKGSFAEILEYNMQLKIDSLITKEFNKLLAIVQDSPQDSYQLKIRVRHNNKLPREKYTEHEIKLEVYDCRKSHDHNEPIILSQQSTGFQWAFNFMFGFLYNVGSHFSFNHNIIYVMDEPATHLSVPARKEFRKFLKEYAHKNHVTFVLATHDPFLVDTDHLDEIRIVEKETEGSVIKNHFNYPLNNASKDSDALDKIKRSLGVGQHVFHNPQKHRIIFVEGITDYCYLSAFKLYLRYKEYKDNPIPFTFLPISGLKNDSNDMKETIEKLCELDNHPIVLTDDDRKCVFNQQATSERFKRANEEMHDPITILQLSDCDRHFKQIEDCFSANDRNKYAKNKQMELSMAFKTRLLYGGEDAIEKQTKRNFLKLFKWIAWATNLIKN

SEQ ID NO: 9227 - protein, 916 aa, Helicobacter pylori
  misc_feature (B) LOCATION 1...916
  hypothetical: YES
VDLRIQSKEVSHNLKELSKTLISYPFEKHVEALGEQCSNFVSIPINNDDYSNICTFVSDFINLIASYNLLESFLDFYKDKLKLSELVTEYANVTNNLLFKKLIKHLSGNNQLVKNFYQCIREIIKYNAPNKEYKPNQFFIIGKGKQKQLAKIYSHLKELSASEIKPQDMEDILKKLEELDKIFKTTDFTKFTPKTEIKDIIKEIDEKYPINENFKRQFNEFESNIEKHDEIKKDFERNKESLIREIENHCKNECNSEEEPEYKINDLLKNIQQICKNYIESHAVNDVSKDIKSMMCQFYLKQIDLLVNSEIVRYRYSNLFEPIQRSLWESIKILDNESGIYLFPKNIGEIKDKFEANKEKFKQSKNVSEFAEYCRECNPYTAFNFHLNINNGLSHQFEKFVPIMKEYKEPKITDNDLEAISTKETGLASQLSGHWFFQLSLFNKTNFNPNKIWIPLEFNKRSKIKFDKDLEIYFDSHESFNISKKYLQEIDQESLKKIKQSKDFFSIQKIESKHDNNDILQLEFFENDTSFLFAKGSFAEILEYNMQLKIDSLITKEFNKLLAIVQDSPQDSYQLKIRVRHNNKLPREKYTEHEIKLEVYDCRKSHDHNEPIILSQQSTGFQWAFNFMFGFLYNVGSHFSFNHNIIYVMDEPATHLSVPARKEFRKFLKEYAHKNHVTFVLATHDPFLVDTDHLDEIRIVEKETEGSVIKNHFNYPLNNASKDSDALDKIKRSLGVGQHVFHNPQKHRIIFVEGITDYCYLSAFKLYLRYKEYKDNPIPFTFLPISGLKNDSNDMKETIEKLCELDNHPIVLTDDDRKCVFNQQATSERFKRANEEMHDPITILQLSDCDRHFKQIEDCFSANDRNKYAKNKQMELSMAFKTRLLYGGEDAIEKQTKRNFLKLFKWIAWATNLIKN

SEQ ID NO: 9228 - protein, 928 aa, Helicobacter pylori
  misc_feature (B) LOCATION 1...928
  hypothetical: YES
TSLDHKITDFSCVDLRIQSKEVSHNLKELSKTLISYPFEKHVEALGEQCSNFVSIPINNDDYSNICTFVSDFINLIASYNLLESFLDFYKDKLKLSELVTEYANVTNNLLFKKLIKHLSGNNQLVKNFYQCIREIIKYNAPNKEYKPNQFFIIGKGKQKQLAKIYSHLKELSASEIKPQDMEDILKKLEELDKIFKTTDFTKFTPKTEIKDIIKEIDEKYPINENFKRQFNEFESNIEKHDEIKKDFERNKESLIREIENHCKNECNSEEEPEYKINDLLKNIQQICKNYIESHAVNDVSKDIKSMMCQFYLKQIDLLVNSEIVRYRYSNLFEPIQRSLWESIKILDNESGIYLFPKNIGEIKDKFEANKEKFKQSKNVSEFAEYCRECNPYTAFNFHLNINNGLSHQFEKFVPIMKEYKEPKITDNDLEAISTKETGLASQLSGHWFFQLSLFNKTNFNPNKIWIPLEFNKRSKIKFDKDLEIYFDSHESFNISKKYLQEIDQESLKKIKQSKDFFSIQKIESKHDNNDILQLEFFENDTSFLFAKGSFAEILEYNMQLKIDSLITKEFNKLLAIVQDSPQDSYQLKIRVRHNNKLPREKYTEHEIKLEVYDCRKSHDHNEPIILSQQSTGFQWAFNFMFGFLYNVGSHFSFNHNIIYVMDEPATHLSVPARKEFRKFLKEYAHKNHVTFVLATHDPFLVDTDHLDEIRIVEKETEGSVIKNHFNYPLNNASKDSDALDKIKRSLGVGQHVFHNPQKHRIIFVEGITDYCYLSAFKLYLRYKEYKDNPIPFTFLPISGLKNDSNDMKETIEKLCELDNHPIVLTDDDRKCVFNQQATSERFKRANEEMHDPITILQLSDCDRHFKQIEDCFSANDRNKYAKNKQMELSMAFKTRLLYGGEDAIEKQTKRNFLKLFKWIAWATNLIKN

SEQ ID NO: 9229 - protein, 200 aa, Helicobacter pylori
  misc_feature (B) LOCATION 1...200
  hypothetical: YES
VQLLKDNKEVVVLDTDSQKSMETFATIRAEKERPTFSLFNRSSGFSDTLKQMVSKYENILIDTKGEYSKETQKAMLLSNIVLVPTTPSQLDTEVLANMLERIEQLQELNENLRALIVINRMPTIPTLKERQALIEFIKENNPSDRITLLESSLSERIVYKRSVSEGLGVIEYSDKKAINEWVNFYNELKSHLEKEKIHTF

SEQ ID NO: 9230 - protein, 227 aa, Helicobacter pylori
  misc_feature (B) LOCATION 1...227
  hypothetical: YES
NKENNITICVANEKGGSGKSTLCLNLAVQLLKDNKEVVVLDTDSQKSMETFATIRAEKERPTFSLFNRSSGFSDTLKQMVSKYENILIDTKGEYSKETQKAMLLSNIVLVPTTPSQLDTEVLANMLERIEQLQELNENLRALIVINRMPTIPTLKERQALIEFIKENNPSDRITLLESSLSERIVYKRSVSEGLGVIEYSDKKAINEWVNFYNELKSHLEKEKIHAF

SEQ ID NO: 9231 - protein, 88 aa, Helicobacter pylori
  misc_feature (B) LOCATION 1...88
  hypothetical: YES
EGFYYLSPQIFNAPGVKIGWDSNPNFSGTGFRSDTAIIGFFPIYYPWMIVKSNGSPVYRYDTPATQNGQNSLSANAWTSTITMFQSLL

SEQ ID NO: 9232 - protein, 92 aa, Helicobacter pylori
  misc_feature (B) LOCATION 1...92
  hypothetical: YES
MHVACLLALGDNLITLSLLKEIASKQQQSLKILGTHLTLKIAKLLECEKHFEIIPVFENIPAFYDLKKQGVFWAMKDFLWLLKQLKNIKSNV

SEQ ID NO: 9233 - protein, 282 aa, Helicobacter pylori
  misc_feature (B) LOCATION 1...282
  hypothetical: YES
MHVACLLALGDNLITLSLLKEIASKQQQSLKILGTHLTLKIAKLLECEKHFEIIPVFENIPAFYDLKKQGVFWAMKDFLWLLKAIKKHQIKRLILEKQDFRSFLLSQFVSITTPNKEIKNVYQNRQELFSQIYGHVFDNPPYPMSLKNPKKILINPFTRENDRNISLEHLKIVLKLLKPFCVTLLDFEERYAFLKDRVAHYRAKTSLEEVKNLILESDLYIGGDSFLIHLAYYLKKNYFIFFYRDNDDFMPPNSGNENFLKAHKSHFIEQDLAKKFRHLGLL

SEQ ID NO: 9234 - protein, 295 aa, Helicobacter pylori
  misc_feature (B) LOCATION 1...295
  hypothetical: YES
KKKTLNISQLGKTMHVACLLALGDNLITLSLLKEIASKQQQSLKILGTHLTLKIAKLLECEKHFEIIPVFENIPAFYDLKKQGVFWAMKDFLWLLKAIKKHQIKRLILEKQDFRSFLLSQFVSITTPNKEIKNVYQNRQELFSQIYGHVFDNPPYPMSLKNPKKILINPFTRENDRNISLEHLKIVLKLLKPFCVTLLDFEERYAFLKDRVAHYRAKTSLEEVKNLILESDLYIGGDSFLIHLAYYLKKNYFIFFYRDNDDFMPPNSGNENFLKAHKSHFIEQDLAKKFRHLGLL

SEQ ID NO: 9235 - protein, 251 aa, Helicobacter pylori
  misc_feature (B) LOCATION 1...251
  hypothetical: YES
VSLIKVSGDKKVIEVSIPLTSISGKARVKIRHAFSDYGISTATRKIPFSLKHYVEWQIGYDVPIKDKEKFELTTLKDEKYHFLGANNKVKTLYELSEMIYYAKRLGLISLENLENTLKFLEKQKQFIEDNFMITRERFRSHQFGGMDFELSRISYPLLIHSFDDNELSEIVIKEQQYGSKTQAMLYFCFSILELKTATPLLNRTAMPKEHALLIIHETNALVFLEMLKIFGLLSQVHHNDVLKILEKILQN

SEQ ID NO: 9236 - protein, 251 aa, Helicobacter pylori; identical to SEQ ID NO: 9235
  misc_feature (B) LOCATION 1...251
  hypothetical: YES

SEQ ID NO: 9237 - protein, 262 aa, Helicobacter pylori
  misc_feature (B) LOCATION 1...262
  hypothetical: YES
NILKNCFKDTLVSLIKVSGDKKVIEVSIPLTSISGKARVKIRHAFSDYGISTATRKIPFSLKHYVEWQIGYDVPIKDKEKFELTTLKDEKYHFLGANNKVKTLYELSEMIYYAKRLGLISLENLENTLKFLEKQKQFIEDNFMITRERFRSHQFGGMDFELLRISYPLLIHSFDDNELSEIVIKEQQYGSKTQAMLYFCFSILELKTATPLLNRTAMPKEHALLIIHETNALVFLEMLKIFGLLSQVHHNDVLKILEKILQN

SEQ ID NO: 9238 - protein, 68 aa, Helicobacter pylori
  misc_feature (B) LOCATION 1...68
  hypothetical: YES
ITSELSKQFEWIAVEDLQVNNMTKRAKLKTKLKNVKQKSGLNQSILNASFYQIISFLDCKQQHNSDKQ

SEQ ID NO: 9239 - protein, 252 aa, Helicobacter pylori
  misc_feature (B) LOCATION 1...252
  hypothetical: YES
MLGKKNEEVLIDENLVGGVIALDRLAKLNKANRTFKRAFYLSMVLNVAAVTSIVMMMPLKKTDIFVYGIDRYTGEFKIVKRSDARQIVNSEAVVDSATSKFVSLLFGYSKNSLRDRKDQLMQYCDVSFQTQAMRMFNENIRQFVDKVRAEAIISSNIQREKVKNSPLTRLTFFITIKITPDTMENYEYITKKQVTIYYDFARGNSSQENLIINPFGFKVFDIQITDLQNEQTVSEILRKIKEVESKNKALNK

SEQ ID NO: 9240 - protein, 252 aa, Helicobacter pylori; identical to SEQ ID NO: 9239
  misc_feature (B) LOCATION 1...252
  hypothetical: YES

SEQ ID NO: 9241 - protein, 255 aa, Helicobacter pylori
  misc_feature (B) LOCATION 1...255
  hypothetical: YES
SCRMLGKKNEEVLIDENLVGGVIALDRLAKLNKANRTFKRAFYLSMVLNVAAVTSIVMMMPLKKTDIFVYGIDRYTGEFKIVKRSDARQIVNSEAVVDSATSKFVSLLFGYSKNSLRDRKDQLMQYCDVSFQTQAMRMFNENIRQFVDKVRAEAIISSNIQREKVKNSPLTRLTFFITIKITPDTMENYEYITKKQVTIYYDFARGNSSQENLIINPFGFKVFDIQITDLQNEQTVSEILRKIKEVESKNKALNK

SEQ ID NO: 9242 - protein, 156 aa, Helicobacter pylori
  misc_feature (B) LOCATION 1...156
  hypothetical: YES
VNLGAYYTPPYLVDCAYKLLKKHVGIENYTLLDTACGNKEFLKLHHPKKIGADIDPKCDALIINALANPKRENYGISQDEPLIIVGNPPYNDRTSFIKQDIKNKDFIFEIDNDLKSRDLGISFLKSFAILKPAFICVLHPLSYLIKEANFKQFKAI

SEQ ID NO: 9243 - protein, 343 aa, Helicobacter pylori
  misc_feature (B) LOCATION 1...343
  hypothetical: YES
LIRTPKHLTKQESVNLGAYYTPPYLVDCAYKLLKKHVGIENYTLLDTACGNKEFLKLHHPKKIGADIDPKCDALIINALANPKRENYGISQDEPLIIVGNPPYNDRTSFIKQDIKNKDFIFEIDNDLKSRDLGISFLKSFAILKPAFICVLHPLSYLIKEANFKQLKLFKDHYRLLDAFVVSSKSFTKSNEFPIVIALYERGRMDYAGIRRFVFPTDCDTTLCLNDFDYIANYVDKYPNAKKVGACVGYFFPMRDINALKRNKTFLNAPSENAVRISQDKLIYYQYIHYFKEIAPKIPYYFGNLDIIIDHFAFLEIKDAFLKDKRARLEYFKKLFQGHPCEFD

SEQ ID NO: 9244 - protein, 345 aa, Helicobacter pylori
  misc_feature (B) LOCATION 1...345
  hypothetical: YES
GVLIRTPKHLTKQESVNLGAYYTPPYLVDCAYKLLKKHVGIENYTLLDTACGNKEFLKLHHPKKIGADIDPKCDALIINALANPKRENYGISQDEPLIIVGNPPYNDRTSFIKQDIKNKDFIFEIDNDLKSRDLGISFLKSFAILKPAFICVLHPLSYLIKEANFKQLKLFKDHYRLLDAFVVSSKSFTKSNEFPIVIALYERGRMDYAGIRRFVFPTDCDTTLCLNDFDYIANYVDKYPNAKKVGACVGYFFPMRDINALKRNKTFLNAPSENAVRISQDKLIYYQYIHYFKEIAPKIPYYFGNLDIIIDHFAFLEIKDAFLKDKRARLEYFKKLFQGHPCEFD

SEQ ID NO: 9245 - protein, 169 aa, Helicobacter pylori
  misc_feature (B) LOCATION 1...169
  hypothetical: YES
LFEKWIGLTLLLSSLGYPCQKVSISFKQYENLIHIHQKGCNNEVVCRTLISIALLESSLGLNNKREKSLKDTSYSMFHITLNTAKKFYPTYSKTLLKTKLLNDVGFAIQLAKQILKENFDYYHQKHPNKSVYQLVEMAIGAYNGGMKHNPNGAYMKKFRCIYSQVRYNE

SEQ ID NO: 9246 - protein, 169 aa, Helicobacter pylori
  misc_feature (B) LOCATION 1...169
  hypothetical: YES
LFEKWIGLTLLLSSLGYPCQKVSISFKQYENLIHIHQKGCNNEVVCRTLISIALLESSLGLNNKREKSLKDTSYSMFHITLNTAKKFYPTYSKTLLKTKLLNDVGFAIQLAKQILKENFDYYHQKHPNKSVYQLVQMAIGAYNGGMKHNPNGAYMKKFRCIYSQVRYNE

SEQ ID NO: 9247 - protein, 172 aa, Helicobacter pylori
  misc_feature (B) LOCATION 1...172
  hypothetical: YES
VKVLFEKWIGLTLLLSSLGYPCQKVSISFKQYENLIHIHQKGCNNEVVCRTLISIALLESSLGLNNKREKSLKDTSYSMFHITLNTAKKFYPTYSKTLLKTKLLNDVGFAIQLAKQILKGNFDYYHQKHPNKSVYQLVEMAIGAYNGGMKHNPNGAYMKKFRCIYSQVRYNE

SEQ ID NO: 9248 - protein, 54 aa, Helicobacter pylori
  misc_feature (B) LOCATION 1...54
  hypothetical: YES
FPLKPLDNKTLEEIGLDWHTNDDMSSYIADEMVVVSQKEADAIMTLVMSFMTCL

SEQ ID NO: 9249 - protein, 90 aa, Helicobacter pylori
  misc_feature (B) LOCATION 1...90
  hypothetical: YES
LIKSKSKKWLLVGEGANSEIFEASMQSLLKTDGVYSNHKPIYQEFYELNSHNGLYYQPNVFFAYESCALGFRKGGLILDNFSKFVSHRLQ

SEQ ID NO: 9250 - protein, 143 aa, Helicobacter pylori
  misc_feature (B) LOCATION 1...143
  hypothetical: YES
GWKILFSSVRGNIEEERTMRFLQDVAQSVGFETDFSYIDEVEFNVEEGVFKNGLNHEFLFKLIPWENIAIDEPELALLMQGMMENKNTIFLNPAYTILFQSKRFLKLLWDRYPKHPLLLETSYEPLANKKQIKKVAFGRGRGE

SEQ ID NO: 9251 - protein, 364 aa, Helicobacter pylori
  misc_feature (B) LOCATION 1...364
  hypothetical: YES
MSSYIADEMVVVSQKEADAYYDACNELYDMFVETAEEAIKNDRFFELDIPNALIPMIKQSFEEEVHWHIYGRFDLAGGLDGKPIKLLEFNADTPTMLYETAVIQWALLKANGYDENKQFNNLYEALGENFKRMVTLGEDTSRFEEMYEGWKILFSSVRGNIEEERTMRFLQDVAQSVGFETDFSYIDEVEFNVEEGVFKNGLNHEFLFKLIPWENIAIDEPELALLMQGMMENKNTIFLNPAYTILFQSKRFLKLLWDRYPKHPLLLETSYEPLANKKQIKKVAFGREGANSEIFEASMQSLLKTDGVYSNHKPIYQEFYELNSHNGLYYQPNVFFAYESCALGFRKGGLILDNFSKFVSHRLQ

SEQ ID NO: 9252 - protein, 163 aa, Helicobacter pylori
  misc_feature (B) LOCATION 1...163
  hypothetical: YES
VVVIILVVVIIQNSSSLKEEREQERAIKPDTKNNSFNETNPTEEKKLEPTPKLEEKHKEQDKQGKEAIKENPNTIYIIPKRDIWVEVIDLDEKKNSFQKVFKKSYPLEAKNHRLLLRFGHGHLILKNNHQEQDYNDSKTRRFLYEPNKGLTLINEAQYKALQQ

SEQ ID NO: 9253 - protein, 321 aa, Helicobacter pylori
  misc_feature (B) LOCATION 1...321
  hypothetical: YES
MEQNKKSLENLDLSDVQNISKDISGTALEELSLKNLDKNLQILKEVGAAEICKATKIASKNIHSILEKRYESLSRVHARGFIQILEHEYKIDLSAWVKEFDKVCVFKEGVGEEQKQETSPEETAKKPLKVELDYSINQANTSLSKKSSKWKPFVIVLGVVVIILVVVIIQNSSSLKEEREQERAIKPDTKNNSFNETNPTEEKKLEPTPKLEEKHKEQDKQGKEAIKENPNTIYIIPKRDIWVEVIDLDEKKNSFQKVFKKSYPLEAKNHRLLLRFGHGHLILKNNHQEQDYNDSKTRRFLYEPNKGLTLINEAQYKALQQ

SEQ ID NO: 9254 - protein, 321 aa, Helicobacter pylori; identical to SEQ ID NO: 9253
  misc_feature (B) LOCATION 1...321
  hypothetical: YES

SEQ ID NO: 9255 - protein, 193 aa, Helicobacter pylori
  misc_feature (B) LOCATION 1...193
  hypothetical: YES
GVYHNKEIIVAYRKIGKVHSTLTTTSMILAFGVQKVLFSGVAGSLVKDLKINDLLVATQLVQHDVDLSAFDHPLGFIPESAIFIETSGSLNALAKKIANEQHIALKEGVIASGDQFVHSKERKEFLVSEFKASAVEMEGASVAFVCQKFGVPCCVLRSISDNADEKAGMSFDEFLEKSAHTSAKFLKSMVDEL

SEQ ID NO: 9256 - protein, 231 aa, Helicobacter pylori
  misc_feature (B) LOCATION 1...231
  hypothetical: YES
MVQKIGILGAMREEITPILELFGVDFEEIPLGGNVFHKGVYHNKEIIVAYSKIGKVHSTLTTTSMILAFGVQKVLFSGVAGSLVKDLKINDLLVATQLVQHDVDLSAFDHPLGFIPESAIFIETSGSLNALAKKIANEQHIALKEGVIASGDQFVHSKERKEFLVSEFKASAVEMEGASVAFVCQKFGVPCCVLRSISDNADEKAGMSFDEFLEKSAHTSAKFLKSMVDEL

SEQ ID NO: 9257 - protein, 258 aa, Helicobacter pylori
  misc_feature (B) LOCATION 1...258
  hypothetical: YES
VGGALAHISPLSIEYAAPFVGNAGVALAGLMSDEIYLCALDCAYIKGFKKHAQNSYYGDEKEIDTSSLISVEGNVEGYETFSDSLFLLSKERIEEALHYYQPKKVYNLSYGAKIKHAVSLNHSQVKLKQINKQDAIVRIKSMFSPRSNHAKDLKNLQKNLIRFKEDFFTHLNTPCKTKQEAFEWVDSLSGFCQTASAKTPTIGILFEGSVAHILQSVLIVSLHLKENELTRFIKFSQNALKQFLKKACLLLQMQLKQP

SEQ ID NO: 9258 - protein, 405 aa, Helicobacter pylori
  misc_feature (B) LOCATION 1...405
  hypothetical: YES
MPFLKALASFDAPFLEKEISKRFRDNLVFFKSYHPNLFNALNTPFKNYQLLFETNHLNLLHTPTNALSYPKHQMIETAFNMAKNPLNNPRWSLDNNHLSLHYLKSQNNHKLPLTLKATHAISNFLDNHQTPCSLKKFLPPTMIYGVLDGLFLAILQAQNYRFHSLYLFEENLDLFKISCYFARYEDLIKKGAKLFIQGFFNPNELKMDFLKRPITHSFLKLEIMPYKSAFNLRMRENIQSYYKQALRGWGSFEDELLGLKNTLKNLPLYQTLKTKPKKINAPICVVGNGPSLDLLLDFLKENEEKFIIFSCGTALKPLKAHGVKVDFQIEVERIDYLKEVLERAPLEDTPLMGANMLNPNAFDLAKEALMFMRGGSACAYKPFEYRIRSAFCGQCRGGFSGFDER

SEQ ID NO: 9259 - protein, 131 aa, Helicobacter pylori
  misc_feature (B) LOCATION 1...131
  hypothetical: YES
MHPIMFAYIANALAQARKINGTLCMAFQKISQVKELGIDKAKSLIGNLSQVIIYPTKDTDELIECGVPLSDSEINFLHNTDMRARQVLVKNIVTNASAFIEIDLKKICKNYFIFLIAMLVIEKSSMILKKQ

SEQ ID NO: 9260 - protein, 140 aa, Helicobacter pylori
  misc_feature (B) LOCATION 1...140
  hypothetical: YES
MHPIMFAYIANALAQARKINGTLCMAFQKISQVKELGIDKAKSLIGNLSQVIIYPTKDTDELIECGVPLSDSEINFLHNTDMRARQVLVKNIVTNASAFIEIDLKKICKNYFIFLIAMLVIEKSSMILKKQTKKLIRKSI

SEQ ID NO: 9261 - protein, 159 aa, Helicobacter pylori
  misc_feature (B) LOCATION 1...159
  hypothetical: YES
SKRTQQTFFLFIDETKDYIMHPIMFAYIANALAQARKINGTLCMAFQKISQVKELGIDKAKSLIGNLSQVIIYPTKDTDELIECGVPLSDSEINFLHNTDMRARQVLVKNIVTNASAFIEIDLKKICKNYFIFLIAMLVIEKSSMILKKQTKKLIRKSI

SEQ ID NO: 9262 - protein, 328 aa, Helicobacter pylori
  misc_feature (B) LOCATION 1...328
  hypothetical: YES
MEKVCVSAWGLPKILEERLKEKYGDDWEKHVKAKAINEEELEEQVKAKAKEQQKTQREKTLNGFLKKVGLKKRDMLQSTMLFDEVKEADVLFQAERKIGDWIFSSAVFFFALALIEAIIIVCLLPLKEKVPYLVTFSNATQNFAIVQRADKSIRANQALVRQLVASYVNNRENISSIKEQNEIAHETIRLQSAFEVWDFFEKLVSYEHSIYTNINLTRKISIINIALISKTQANIEISAQLFHKEKLESEKRYRIIMTFEFEPIEIDTKSVPLNPTGFIVTGYDVTEIAILKDLDEKNKVKDDGVKSRIIHVEKKDPHMSQYKDVKEQ

SEQ ID NO: 9263 - protein, 328 aa, Helicobacter pylori; identical to SEQ ID NO: 9262
  misc_feature (B) LOCATION 1...328
  hypothetical: YES

SEQ ID NO: 9264 - protein, 338 aa, Helicobacter pylori
  misc_feature (B) LOCATION 1...338
  hypothetical: YES
KIFKKALRHKMEKVCVSAWGLPKILEERLKEKYGDDWEKHVKAKAINEEELEEQVKAKAKEQQKTQREKTLNGFLKKVGLKKRDMLQSTMLFDEVKEADVLFQAERKIGDWIFSSAVFFFALALIEAIIIVCLLPLKEKVPYLVTFSNATQNFAIVQRADKSIRANQALVRQLVASYVNNRENISSIKEQNEIAHETIRLQSAFEVWDFFEKLVSYEHSIYTNINLTRKISIINIALISKTQANIEISAQLFHKEKLESEKRYRIIMTFEFEPIEIDTKSVPLNPTGFIVTGYDVTEIAILKDLDEKNKVKDDGVKSRIIHVEKKDPHMSQYKDVKEQ

SEQ ID NO: 9265 - protein, 233 aa, Helicobacter pylori
  misc_feature (B) LOCATION 1...233
  hypothetical: YES
MDILKAEHLNKQIKKTKIVSDVSLEVKSGEVVGLLGPNGAGKTTTFYMICGLLEPSGGSVYLNDVDLAKYPLHKRSNLGIGYLPQESSIFKELSVEENLALAGESTFKNSKESEEKMESLLDAFNIQAIRERKGMSLSGGERRRVEIARALMKNPKFVLLDEPFAGVDPIAVIDIQRIIESLIGLNIGVLITDHNVRETLSVCHRAYVIKSGTLLAAGTLMKFMKTLWCVSII

SEQ ID NO: 9266 - protein, 240 aa, Helicobacter pylori
  misc_feature (B) LOCATION 1...240
  hypothetical: YES
MDILKAEHLNKQIKKTKIVSDVSLEVKSGEVVGLLGPNGAGKTTTFYMICGLLEPSGGSVYLNDVDLAKYPLHKRSNLGIGYLPQESSIFKELSVEENLALAGESTFKNSKESEEKMESLLDAFNIQAIRERKGMSLSGGERRRVEIARALMKNPKFVLLDEPFAGVDPIAVIDIQRIIESLIGLNIGVLITDHNVRETLSVCHRAYVIKSGTLLASGNANEIYENALVRKYYLGENFKV

SEQ ID NO: 9267 - protein, 240 aa, Helicobacter pylori; identical to SEQ ID NO: 9266
  misc_feature (B) LOCATION 1...240
  hypothetical: YES

SEQ ID NO: 9268 - protein, 94 aa, Helicobacter pylori
  misc_feature (B) LOCATION 1...94
  hypothetical: YES
MYGVKEIKDKIDKQLHNNDHLFEGLFGEKEDLKKLVSMFGQLRFQKRWSQTPRVPQTSVLGHTLCVAIMGYLLSFDLKACKSMRINHFLGGLFP

SEQ ID NO: 9269 - protein, 406 aa, Helicobacter pylori
  misc_feature (B) LOCATION 1...406
  hypothetical: YES
MYAAHPIKPIKAPKLKSQFLRRVFVGASIRRWNDQACPLEFVELDKQAHKAMIAYLLAKDLKDRGKDLDLDLLIKYFCFEFLERLVLTDIKPPIFYALQQTHSKELASYVAQSLQDEISAYFSLEELKEYLSHRPQILETQILESAHFYASKWEFDIIYHFNPNMYGVKEIKDKIDKQLHNNDHLFEGLFGEKEDLKKLVSMFGQLRFQKRWSQTPRVPQTSVLGHTLCVAIMGYLLSFDLKACKSMRINHFLGGLFHDLPEILTRDIITPIKQSVAGLDHCIKEIEKKEMQNKVYSFVSLGVQEDLKYFTENEFKNRYKDKSHQIVFTKDAEELFTLYNSDEYLGVCGELLKVCDHLSAFLEAQISLSHGISSYDLIQGAKNLLELRSQTELLDLDLGKLFRDFK

SEQ ID NO: 9270 - protein, 420 aa, Helicobacter pylori
  misc_feature (B) LOCATION 1...420
  hypothetical: YES
DHSFNIQNSIKRKVMYAAHPIKPIKAPKLKSQFLRRVFVGASIRRWNDQACPLEFVELDKQAHKAMIAYLLAKDLKDRGKDLDLDLLIKYFCFEFLERLVLTDIKPPIFYALQQTHSKELASYVAQSLQDEISAYFSLEELKEYLSHRPQILETQILESAHFYASKWEFDIIYHFNPNMYGVKEIKDKIDKQLHNNDHLFEGLFGEKEDLKKLVSMFGQLRFQKRWSQTPRVPQTSVLGHTLCVAIMGYLLSFDLKACKSMRINHFLGGLFHDLPEILTRDIITPIKQSVAGLDHCIKEIEKKEMQNKVYSFVSLGVQEDLKYFTENEFKNRYKDKSHQIVFTKDAEELFTLYNSDEYLGVCGELLKVCDHLSAFLEAQISLSHGISSYDLIQGAKNLLELRSQTELLDLDLGKLFRDFK

SEQ ID NO: 9271 - protein, 109 aa, Helicobacter pylori
  misc_feature (B) LOCATION 1...109
  hypothetical: YES
QKEVSNYEESILVNTPYARVNILAIEKNESPIELLAPVDLVTALSDLMLGGEGASKEEMDNDDLDAFKEMASNIFGAIATSLKSQELLPKLNFTTTNAEIAKELPKKED

SEQ ID NO: 9272 - protein, 110 aa, Helicobacter pylori
  misc_feature (B) LOCATION 1...110
  hypothetical: YES
QKEVSNYEESILVNTPYARVNILAIEKNESPIELLAPVDLVTALSDLMLGGEGASKEEMDNDDLDAFKEMASNIFGAIATSLKSQELLPKLNFTTTNAEIAKELPKKEDS

SEQ ID NO: 9273 - protein, 155 aa, Helicobacter pylori
  misc_feature (B) LOCATION 1...155
  hypothetical: YES
RLPKKEDYAKAMVFSFKMEAIKESQIVLLITSAFEGQFEKTHKEEKEETTKSATEETKTHDASLENIEIRNISMLLDVKLNVKVRIGQKKMILKDVVSMDIGSVVELDQLVNDPLEILVDDKVIAKGEVVIVDGNFGIQITDIGTKKERLEQLKN

SEQ ID NO: 9274 - protein, 285 aa, Helicobacter pylori
  misc_feature (B) LOCATION 1...285
  hypothetical: YES
MQDFIKIFIQEVVSTLEGLVGKAPSVGLEKEVSNNEEASLISTPYARVKISAIEKNESPIELLAPVDLVTALSDLMLGGEGASKEEMDNDDLDAFKEMASNIFGAIATSLKSQELLPKLNFTTTNAEIAKELPKKEDYAKAMVFSFKMEAIKESQIVLLITSAFEGQFEKTHKEEKEETTKSATEETKTHDASLENIEIRNISMLLDVKLNVKVRIGQKKMILKDVVSMDIGSVVELDQLVNDPLEILVDDKVIAKGEVVIVDGNFGIQITDIGTKKERLEQLKN

SEQ ID NO: 9275 - protein, 171 aa, Helicobacter pylori
  misc_feature (B) LOCATION 1...171
  hypothetical: YES
MSNQASHLDNFMNAKNPKSFFDNKGNTKFIAITSGKGGVGKSNISANLAYSLYKKGYKVGVFDANIGLANLDVIFGVKTQKNILHDLKGEDKLKEIICEIEPGLCLIPGDSGEEILKYISEAEDFDSFLDEEGVLSALIYILINTFSKNLGPLSQTFLNFQSFLFIFIQSP

SEQ ID NO: 9276 - protein, 294 aa, Helicobacter pylori
  misc_feature (B) LOCATION 1...294
  hypothetical: YES
MSNQASHLDNFMNAKNPKSFFDNKGNTKFIAITSGKGGVGKSNISANLAYSLYKKGYKVGVFDADIGLANLDVIFGVKTHKNILHALKGEAKLQEIICEIEPGLCLIPGDSGEEILKYISGAEALDRFVDEEGVLSSLDYIVIDTGAGIGATTQAFLNASDCVVIVTTPDPSAITDAYACIKINSKNKDELFLIANMVAQPKEGRATYERLFKVAKNNIASLELHYLGAIENSSLLKRYVRERKILRKIAPNDLFSQSIDQIASLLVSKLETGTLEIPKEGLKSFFKRLLKYLG

SEQ ID NO: 9277 - protein, 297 aa, Helicobacter pylori
  misc_feature (B) LOCATION 1...297
  hypothetical: YES
GTSMSNQASHLDNFMNAKNPKSFFDNKGNTKFIAITSGKGGVGKSNISANLAYSLYKKGYKVGVFDADIGLANLDVIFGVKTHKNILHALKGEAKLQEIICEIEPGLCLIPGDSGEEILKYISGAEALDRFVDEEGVLSSLDYIVIDTGAGIGATTQAFLNASDCVVIVTTPDPSAITDAYACIKINSKNKDELFLIANMVAQPKEGRATYERLFKVAKNNIASLELHYLGAIENSSLLKRYVRERKILRKIAPNDLFSQSIDQIASLLVSKLETGTLEIPKEGLKSFFKRLLKYLG

SEQ ID NO: 9278 - protein, 66 aa, Helicobacter pylori
  misc_feature (B) LOCATION 1...66
  hypothetical: YES
PRIIAFFWIWGSNTNAIALIGLARLFLNPKDFVFKREQSFKDKERQKIYDIVKEAQEKAIQALERG

SEQ ID NO: 9279 - protein, 70 aa, Helicobacter pylori
  misc_feature (B) LOCATION 1...70
  hypothetical: YES
RLWLWAVFTHSTGHGIDLDIHELPYISSRSETILEEGMVFSVEPGIYIPGFFGVRIEDLVVIKNSRAELL

SEQ ID NO: 9280 - protein, 236 aa, Helicobacter pylori
  misc_feature (B) LOCATION 1...236
  hypothetical: YES
LMRGLERESHFTLNENAMFFECAYSCDNALFLQLDDRSFFITDSRYTQEAKESLQPKKGVLVEVIESSDLVQSAIDLITKSSVKKLFFDPNQVNLQTYKRLDSAVGNKVVLEGVPSYHRQKRIIKNEHEIQLLKKSQALNVEAFENFAEYVKKIFDEKESLSERYLQHKVKDFLTKEGVYDLSFEPILALNANASKPHALPSAKDFLTANHSILLDMGIKYERYCSDRTRTAFFEP

SEQ ID NO: 9281 - protein, 246 aa, Helicobacter pylori
  misc_feature (B) LOCATION 1...246
  hypothetical: YES
PDQQSKIKGLLMRGLERESHFTLNENAMFFECAYSCDTALFLQLDDRSFFIPDSRYTQEAKESLQPKKGVLVEVIESSDLVQSAIDLITKSSVKKLFFDPNQVNLQTYKRLDSAVGNKVVLEGVPSYHRQKRIIKNEHEIQLLKKSQALNVEAFENFAEYVKKIFDEKESLSERYLQHKVKDFLTKEGVYDLSFEPILALNANASKPHALPSAKDFLTANHSILLDMGIKYERYCSDRTRTAFFEP

SEQ ID NO: 9282 - protein, 357 aa, Helicobacter pylori
  misc_feature (B) LOCATION 1...357
  hypothetical: YES
MRGLERESHFTLNENAMFFECAYSCDNALFLQLDDRSFFITDSRYTQEAKESLQPKKGVLVEVIESSDLVQSAIDLITKSSVKKLFFDPNQVNLQTYKRLDSAVGNKVVLEGVPSYHRQKRIIKNEHEIQLLKKSQALNVEAFENFAEYVKKIFDEKESLSERYLQHKVKDFLTKEGVYDLSFEPILALNANASKPHALPSAKDFLKADHSILLDMGIKYERYCSDRTRTAFFDPKDFVFKREQSFKDKERQKIYDIVKEAQEKAISGIRAGMTGKEADSLARGVISDYGYGQYFTHSTGHGIDLDIHELPYISSRSETILEEGMVFSVEPGIYIPGFFGVRIEDLVVIKNSRAELL

SEQ ID NO: 9283 - protein, 153 aa, Helicobacter pylori
  misc_feature (B) LOCATION 1...153
  hypothetical: YES
MHYSYEAFLKDSLELAKQVERLCGIPEALVCVMRGGMTLVHFLSLHWNLREVYGINAISYDTTKRQNALKIENTPTIKDHLKTILVVDEIVDSGNSLEAVLKVLQDKHPDKKFYSASLFQKTSAKYKADAFLKDAPEWIDFFWEVDLKNLKSH

SEQ ID NO: 9284 - protein, 158 aa, Helicobacter pylori
  misc_feature (B) LOCATION 1...158
  hypothetical: YES
NLRTIMHYSYEAFLKDSLELAKQVERLCGIPEALVCVMRGGMTLVHFLSLHWNLREVYGINAISYDTTKRQNALKIENTPTIKDHLKTILVVDEIVDSGNSLEAVLKVLQDKHPDKKFYSASLFQKTSAKYKADAFLKDAPEWIDFFWEVDLKNLKSH

SEQ ID NO: 9285 - protein, 47 aa, Helicobacter pylori
  misc_feature (B) LOCATION 1...47
  hypothetical: YES
ALERVGCKWRSRFLGTKECDAKAYADLLPTLKKEDILLIKSPVGYPA

SEQ ID NO: 9286 - protein, 83 aa, Helicobacter pylori
  misc_feature (B) LOCATION 1...83
  hypothetical: YES
ILTNIKERAMVSTLKPLKIGKHTIKFPIFQGGMGVGISWDELAGNVAKEGALGVISAVGTGYYKNMRFVERIVAKKPFEALNF

SEQ ID NO: 9287 - protein, 88 aa, Helicobacter pylori
  misc_feature (B) LOCATION 1...88
  hypothetical: YES
AIRLRLSIRGLIKRIEEGNAPKIACVSNCVTPCNRGEETKKVGYCIADGLGRSYLGNREEGLYFTGANGYRVDKIISVHELIKELTEG

SEQ ID NO: 9288 - protein, 186 aa, Helicobacter pylori
  misc_feature (B) LOCATION 1...186
  hypothetical: YES
PFEALNFYSKKALNEIFANARKICGNKPLGANILYAINDYGRVLRDSCEAGANIIITGAGLPTNMPEFAKDFSDVALIPIISSAKALKILCKRWSDRYKRIPDAFIVEGPLSGGHQGFKYEDCFKEEFQLENLVPKVVEASKEWGNIPIIAAGGIWDRKDIDTMLSLGASGVQMAISFFRHERMRR

SEQ ID NO: 9289 - protein, 185 aa, Helicobacter pylori
  misc_feature (B) LOCATION 1...185
  hypothetical: YES
FEALNFYSKKALNEIFANARKICGNKPLGANILYAINDYGRVLRDSCEAGANIIITGAGLPTNMPEFAKDFSDVALIPIISSAKALKILCKRWSDRYKRIPDAFIVEGPLSGGHQGFKYEDCFKEEFQLENLVPKVVEASKEWGNIPIIAAGGIWDRKDIDTMLSLGASGVQMAISFFRHERMRR

SEQ ID NO: 9290 - protein, 363 aa, Helicobacter pylori
  misc_feature (B) LOCATION 1...363
  hypothetical: YES
MVSTLKPLKIGKHTIKFPIFQGGMGVGISWDELAGNVAKEGALGVISAVGTGYYKNMRFVERIVAKKPFEALNFYSKKALNEIFANARKICGNKPLGANILYAINDYGRVLRDSCEAGANIIITGAGLPTNMPEFAKDFSDVALIPIISSAKALKILCKRWSDRYKRIPDAFIVEGPLSGGHQGFKYEDCFKEEFQLENLVPKVVEASKEWGNIPIIAAGGIWDKKDIDTMLSLGASGVQMATRFLGTKECDAKAYADLLPTLKKEDILLIKSPVGYPARAINTGVIKRIEEGNAPKIACVSNCVAPCNRGEEAKKVGYCIADGLGRSYLGNREEGLYFTGANGYRVDKIISVHELIKELTEG

SEQ ID NO: 9291 - protein, 363 aa, Helicobacter pylori; identical to SEQ ID NO: 9290
  misc_feature (B) LOCATION 1...363
  hypothetical: YES

SEQ ID NO: 9292 - protein, 75 aa, Helicobacter pylori
  misc_feature (B) LOCATION 1...75
  hypothetical: YES
QFDSQTEVWTIFNKPINSPRALKDELVNESEKESLKILNKEMKNILGEHYMGYKTVSAQAAFYGLSQALIPGTDF

SEQ ID NO: 9293 - protein, 84 aa, Helicobacter pylori
  misc_feature (B) LOCATION 1...84
  hypothetical: YES
GCFLKNKAKWINKNDFKRLYSTYQYNHQNFILLDVPGIEGSEKKVIDQISGANAKSPCYFYVTETPGPPQKGEEGKRGTIVYIQ

SEQ ID NO: 9294 - protein, 158 aa, Helicobacter pylori
  misc_feature (B) LOCATION 1...158
  hypothetical: YES
MHERIERGIXNNECKEIFGNELKQRKTKLIEDIERRFKECEEQFRGSVGKNIEQLEERVKDSLAIIKRINNLGLNPNSNFNMDSGIDTIGLFSSIGGLVLLLLTPVVGEFALIAGVGLALVGVGKSIWSFFDSDYKKSQQRKEVDKNLHQICEKLCRM

SEQ ID NO: 9295 - protein, 340 aa, Helicobacter pylori
  misc_feature (B) LOCATION 1...340
  hypothetical: YES
SQGLIFDKKKQKFLKDFKAGELLYQSHFKPLVEFIAEELLKNSRAKIIQSNCNKALKVVEELQNTIKTTIEKQINPGMKETQDPQQEARFNLDRSTDKFISDLEKSAFSKINQFEFNFRKEMHERIERGIGNNECKEIFGNELKQRKTKLIEDIERRFKECEEQFRGSVGKNIEQLEERVKDSLAIIKRINNLGLNPNSNFNMDSGIDTIGLFSSIGGLVLLLLTPVVGEFALIAGVGLALVGVGKSIWSFFDSDYKKSQQRKEVDKNLHQICEKIVQDVKSRIESYKNGALGMIEELNAGFNKLVDHYERMKRQLEEAHEKLGYIYNSIHLTISNRRIQ

SEQ ID NO: 9296 - protein, 371 aa, Helicobacter pylori
  misc_feature (B) LOCATION 1...371
  hypothetical: YES
MKNILGEHYMGYKTVSAQAAFYGLSQALIPGTDFDKKKQKFLKDFKAGELLYQSHFKPLVEFIAEELLKNSRAKIIQSNCNKALKVVEELQNTIKTTIEKQIDPGIKETQEHQQEARFNLDRSTDKFISDLEKSAFSKINQFEFNFRKEMHERIERGIGNNECKEIFGNELKQRKTKLIEDIERRFKECEEQFRGSVGKNIEQLEERVKDSLAIIKRINNLGLNPNSNFNMDSGIDTIGLFSSIGGLVLLLLTPVVGEFALIAGVGLALVGVGKSIWSFFDSDYKKSQQRKEVDKNLHQICEKIVQDVKSRIESYKNGALGMIEELNAGFNKLVDHYERMKRQLEEAHEKLGYISNSIHLTISKQGACNEE

SEQ ID NO: 9297 - protein, 171 aa, Helicobacter pylori
  misc_feature (B) LOCATION 1...171
  hypothetical: YES
MNVKKKEKPQSGKIDRVDCLEKLGKENTTFLSSIAMGSIGQLAIPIPGVGVLIGGFVGGVMSKTFYDVSLTIFKEAKLARQRRIEIEKECRESIRQLEMYQNQFNEVFERYFHGTIKFFNESFDELERALCAGDADLAIAVNNKIQEGMGQELLFDNKQECWEFITSRKEG

SEQ ID NO: 9298 - protein, 182 aa, Helicobacter pylori
  misc_feature (B) LOCATION 1...182
  hypothetical: YES
MSKKRKRPQSGKIDRVDCLEKLGKENTTFLSSIAMGSIGQLAIPIPGVGVLIGGFVGGVMSKTFYDVSLTIFKEAKLARQRRIEIEKECRESIRQLEMYQNQFNEVFERYFHGTIKFFNESFDELERALCAGDADLAIAVNNKIQEGMGQELLFDNKQECWEFITSRKEGWNFITSRGKTEI

SEQ ID NO: 9299 - protein, 186 aa, Helicobacter pylori
  misc_feature (B) LOCATION 1...186
  hypothetical: YES
RVSMNVKKKGKPQSGKIDRVDCLEKLGKENTTFLSSIAMGSIGQLAIPIPGVGVLIGGFVGGVMSKTFYDVSLTIFKEAKLARQRRIEIEKECRESIRQLEMYQNQFNEVFERYFHGTIKFFNESFDELERALCAGDADLAIAVNNKIQEGMGQELLFDNKQECWEFITSRKEGWNFVTSRGKTEI

SEQ ID NO: 9300 - protein, 90 aa, Helicobacter pylori
  misc_feature (B) LOCATION 1...90
  hypothetical: YES
MIGVYPNYSKKQLKRPLVIFVSRELALANGILTDAYDIEANLYMNARIVMXNNKRKHYEQRVNLHFXRSLGXVFDHRSNHVLCDEKDLLR

SEQ ID NO: 9301 - protein, 213 aa, Helicobacter pylori
  misc_feature (B) LOCATION 1...213
  hypothetical: YES
LKRAKSKNKVRDKLACKLLFWKLKDYQNILLYSPLGHELDIRPLILKLRQKNKRVWLPKSIKKGAHFSKEGFTIAPFRLPLRRLGWFDEPSLSRYYKRELDCIVVPILGMDTSFRRVGFGLGMYDRSLPQLFKKQLKRPLVIFVSRELALANGILTDAYDIEANLYMNARIVMKNNKRKHYEQRVNLHFIRSLGSVFDHRSNHVLCDEKDLLR

SEQ ID NO: 9302 - protein, 231 aa, Helicobacter pylori
  misc_feature (B) LOCATION 1...231
  hypothetical: YES
NLRIITIKTIFRDFCKERLKRAKSKNKVRDKLACKLLFWKLKDYQNILLYSPLGHELDIRPLILKLRQKNKRVWLPKSIKKGAHFSKEGFTIAPFRLPLRRLGWFDEPSLSRYYKRELDCIVVPILGMDTSFRRVGFGLGMYDRSLPQLFKKQLKRPLVIFVSRELALANGILTDAYDIEANLYMNARIVMKNNKRKHYEQRVNLHFIRSLGSVFDHRSNHVLCDEKDLLR

SEQ ID NO: 9303 - protein, 70 aa, Helicobacter pylori
  misc_feature (B) LOCATION 1...70
  hypothetical: YES
STLHRVKDFNKTQDSFSDIKFSTPNQLEQSLNALKNKLAAFFSKHPDKHNGIEFNEIVKTQIEALLYATI

SEQ ID NO: 9304 - protein, 314 aa, Helicobacter pylori
  misc_feature (B) LOCATION 1...314
  hypothetical: YES
KKGLDMLLDYDFLLLLNDESGKPTRYYYLLQDFEKDFVASEVAQNRARQFVKEIIGSKKASKTKNSAIKVSHTKASAIGSETIGSCDLKKACEKIKSGLPFGIISAFKPFKDAFYRDFNHNEQKLLIGAAKSGCIQSSADKLAQLKTRLIYWQDKSVKVDWDKPILIKDFFKGNNYLYRRLCFLLGKHFMDRFLKNNAKASVKDFMSSKEFVNKYRYTPKQNTERAKKLQSYLESKRDFIGFVQTLNSLKDSPQDPFLPNEEISFLVFANEPTIIFNLRDYLLVLAQIFNQQAICYCESKCPIELINASPGKGL

SEQ ID NO: 9305 - protein, 92 aa, Helicobacter pylori
  misc_feature (B) LOCATION 1...92
  hypothetical: YES
IYFEENQLSLSLFGLSPLSTAHPNPFQWVRVQSSTRYYTRFNLAMDRSLSFGSAASDSSALLRLAFATASHSLNLARYHNSQDHYAKGSPSP

SEQ ID NO: 9306 - protein, 47 aa, Helicobacter pylori
  misc_feature (B) LOCATION 1...47
  hypothetical: YES
MLSALVMLPFMEVFYYFNFPLWLNLFLGQTIGAVIFFKLDKLIFSKK

SEQ ID NO: 9307 - protein, 71 aa, Helicobacter pylori
  misc_feature (B) LOCATION 1...71
  hypothetical: YES
MREFFKKLGTEYASKLFLVYWLRWMLSALVMLPFMEVFYYFNFPLWLNLFLGQTIGAVIFFKLDKLIFSKK

SEQ ID NO: 9308 - protein, 75 aa, Helicobacter pylori
  misc_feature (B) LOCATION 1...75
  hypothetical: YES
KGCFMREFFKKLGTEYASKLFLVYWLRWMLSALVMLPFMEVFYYFNFPLWLNLFLGQTIGAVIFFKLDKLIFSKK

SEQ ID NO: 9309 - protein, 199 aa, Helicobacter pylori
  misc_feature (B) LOCATION 1...199
  hypothetical: YES
MSIKENLEQVRNEFKSDEKLLEGAFRLEKFFKRYKWVLLFIVVAFIAYLGDTKLQDYKHEQTRERITQIYNEVLESPNNIALQKRLKEVAPELYDLYQFARASERNDANEFKRLSQSSNEIVKAFAKYSYASLSRDKNLLEKSPILKEMSALQEVNLLYEENSKDAIKKAHQSLSTIPLSSSLYAIISVLKHYGMLEDI

SEQ ID NO: 9310 - protein, 218 aa, Helicobacter pylori
  misc_feature (B) LOCATION 1...218
  hypothetical: YES
MSIKENLEQVRNEFKSDEKLLEGAFRLEKFFKRYKWVLLFIVVAFIAYLGDTKLQDYKHEQTRERITQIYNEVLESPNNIALQKRLKEVAPELYDLYQFARASERNDANEFKRLSQSSNEIVKAFAKYSYASLSRDKNLLEKSPILKEMSALQEVNLLYEENSKDAIKKAHQSLSTIPLSSSLYAIISVLKHYGMLEDIQQNPSKPTNLKKETIQGTH

SEQ ID NO: 9311 - protein, 219 aa, Helicobacter pylori
  misc_feature (B) LOCATION 1...219
  hypothetical: YES
GMSIKENLEQVRNEFKSDEKLLEGAFRLEKFFKRYKWVLLFIVVAFIAYLGDTKLQDYKHEQTRERITQIYNEVLESPNNIALQKRLKEVAPELYDLYQFARASERNDANEFKRLSQSSNEIVKAFAKYSYASLSRDKNLLEKSPILKEMSALQEVNLLYEENSKDAIKKAHQSLSTIPLSSSLYAIISVLKHYGMLEDIQQNPSKPTNLKKETIQGTH

SEQ ID NO: 9312 - protein, 290 aa, Helicobacter pylori
  misc_feature (B) LOCATION 1...290
  hypothetical: YES
MFEEITLAHKDLFSRFLQTQKIVLSDVSFTNCFLWQHARLIQVAVIRDCLVIQTTYENQKPFYFYPIGKRPHECVKELLELEKNLRFHSLTLEQKDDLKDNFVGVFDFTYNRDRSDYVYSIEELIALKGKKYHKKKNHLNQFLTNHANFVYEKISPQNRKEVLEASKAWFLESQTDDIGLINENKGIQSVLENYESLDLKGGLIRVNGEIVSFSFGEVLNEESALIHIEKARTDIAGAYQIINQQLLLNEFSHLTYANREEDLGLEGLRRSKMSYNPVFLIDKYEAVARN

SEQ ID NO: 9313 - protein, 294 aa, Helicobacter pylori
  misc_feature (B) LOCATION 1...294
  hypothetical: YES
KRVAMFEEITLAHKDLFSRFLQTQKIVLSDVSFTNCFLWQHARLIQVAVIRDCLVIQTTYENQKPFYFYPIGKRPHECVKELLELEKNLRFHSLTLEQKDDLKDNFVGVFDFTYNRDRSDYVYSIEELIALKGKKYHKKKNHLNQFLTNHANFVYEKISPQNRKEVLEASKAWFLESQTDDIALINENKGIQSVLENYESLDLKGGLIRVNGEIVSFSFGEVLNEESALIHIEKARTDIAGAYQIINQQLLLNEFSHLTYANREEDLGLEGLRRSKMSYNPVFLIDKYEAVARN

SEQ ID NO: 9314 - protein, 113 aa, Helicobacter pylori
  misc_feature (B) LOCATION 1...113
  hypothetical: YES
IYSHLAPIMHYQLTSFNIIQDLFITCHVLRIKMRVFVCFLGVFVSNGLARFGYVVLIPLLILSGSLTPHQSFQLGIAVLMGYVFGSFLIQFLSPLMSLESIAKISFKLITLSF

SEQ ID NO: 9315 - protein, 222 aa, Helicobacter pylori
  misc_feature (B) LOCATION 1...222
  hypothetical: YES
IFLGGSCLMTFILSLVGLKTRSLRNKSVKKEESAFKIPFHLWLLLISCALNAIGFLPHTLFWVDYLIRHLNISPTIAGTSWAFFGFGATLGSLISGPMAQKLGAKEANIFILILKSIACFLPIFFHQISLLNLSIFIMGAATTANINLFSMMALKIAGAKHFAKASSWVVFSFGIFQALFSYLFTIFLGDLGYVLIFVICGVCLVLSFIVLFPIKMQTAIHK

SEQ ID NO: 9316 - protein, 381 aa, Helicobacter pylori
  misc_feature (B) LOCATION 1...381
  hypothetical: YES
MRVFVCFLGVFVSNGLARFGYVVLIPLLILSGSLTPHQSFQLGIAVLMGYVFGSFLIQFLSPLMSLESIAKISFGLIALSFLVCYFDSIPFFWLWIWRFIAGVASSALMILVAPLSLPYVKEHKKALVGGLIFSAVGIGSVFSGFVLPWISSYNIKWAWIFLGGSCLIAFILSLVGLKTRSLRKKSVKKEESAFKIPFHLWLLLISCALNAIGFLPHTLFWVDYLIRHLNISPTIAGTSWAFFGFGATLGSLISGPMAQKLGAKEANIFILILKSIACFLPIFFHQISLLNLSIFIMGAATTANINLFSMMALKIAGAKHFAKASSWVVFSFGIFQALFSYLFTIFLGDLGYVLIFVICGVCLVLSFIVLFPIKMQTAIHK

SEQ ID NO: 9317 - protein, 89 aa, Helicobacter pylori
  misc_feature (B) LOCATION 1...89
  hypothetical: YES
WRNHFLGSLELKKIALILDGIVAKNFLDLVLRHYSNHNFYIVVVKDESLIPKNYPSTFAFHCFDATSSFRLLQVLNDEVKRCVFNHTRF

SEQ ID NO: 9318 - protein, 409 aa, Helicobacter pylori
  misc_feature (B) LOCATION 1...409
  hypothetical: YES
SDAFLIIQDFKEQRIIHKIIQTHFKRMRVVLSVKRDSEKTLENNEENKDEKLILIDEFEVLANKFISRLPNIPSTPREFGLGKGEIMEIDVPFGSIFAYRHIGSIRQKEYRIVGLYRNDVLLLSTKSLVIQPRDILLVAGNPEILNAVYHQVKSNVGQFPAPFGKSIYLYIDMRLQSRKAMMRDVYQALFLHKRLKSYKLYIQVLHPTSPKFYHKFLSLETESIEVNFDFYGKSFIQKLHEDHQKKMGLIVVGRELFFLKKHRRALHKTATPVYKTNTSGLSKTTQSIVVLNESLSINEDMSSVIFDVSMQMDLGLLLYDFDPNKHYKNEIVNHYENLANTFNRKIEIFQTDIKNPIMYLNSLRNPILHFMPFEECITQTRYLWFLSTKVEKLAFLNDDHPQIFIPVAE

SEQ ID NO: 9319 - protein, 478 aa, Helicobacter pylori
  misc_feature (B) LOCATION 1...478
  hypothetical: YES
LKKIALILDGIVAKNFLDLVLRHYSNHNFYIVVVKDESLIPKNYPSTFAFHCFDATSSFRLLQVLNDEVSDAFLIIQDFKEQRIIHKIIQTHFKRMRVVLSVKRDSEKTLENNEENKDEKLILIDEFEVLANKFISRLPNIPSTPREFGLGKGEIMEIDVPFGSIFAYRHIGSIRQKEYRIVGLYRNDVLLLSTKSLVIQPRDILLVAGNPEILNAVYHQVKSNVGQFPAPFGKSIYLYIDMRLQSRKAMMRDVYQALFLHKRLKSYKLYIQVLHPTSPKFYHKFLSLETESIEVNFDFYGKSFIQKLHEDHQKKMGLIVVGRELFFLKKHRRALHKTATPVYKTNTSGLSKTTQSIVVLNESLSINEDMSSVIFDVSMQMDLGLLLYDFDPNKHYKNEIVNHYENLANTFNRKIEIFQTDIKNPIMYLNSLRNPILHFMPFEECITQTRYLWFLSTKVEKLAFLNDDHPQIFIPVAE

SEQ ID NO: 9320 - protein, 188 aa, Helicobacter pylori
  misc_feature (B) LOCATION 1...188
  hypothetical: YES
IFRAFRRGFFRKTFAYRFTAHHDFMLERMNRRNRTKSDRELLEIIASKNFAIGTDFIVGHPGESESVFEKAFKNLESLPLTHIHPFIYSKRKDTPSSLMRDSVSLEDSKKRLNAIKDLIFHKNKAFRQLQLKLNTPLKALVEAQKDGEFKALDQFFNPIKIKSDKPLRASFLEIKEYEIKERENHAVF

SEQ ID NO: 9321 - protein, 235 aa, Helicobacter pylori
  misc_feature (B) LOCATION 1...235
  hypothetical: YES
KGTKMKKVYFKTFGCRTNLFDTQVMGENLKDFSATLEEQEADIIIINSCTVTNGTDSAVRSYARKMARLDKEVLFTGCGVKTQGKELFEKGLLKGVFGHDNKEKINALLQEKKRFFIDDNLENKHLDTTMVSEFVGKTRAFIKIQEGCDFDCNYCIIPSVRGRARSFEKRKILEQVGLLCSQGVQEVVLTGTNVGSYGKDRGSNIARLIKKLSQITGLKRIRIGSLDLIKSTMNF

SEQ ID NO: 9322 - protein, 418 aa, Helicobacter pylori
  misc_feature (B) LOCATION 1...418
  hypothetical: YES
MKKVYFKTFGCRTNLFDTQVMGENLKDFSATLEEQEADIIIINSCTVTNGTDSAVRSYARKMARLDKEVLFTGCGVKTQGKELFEKGLLKGVFGHDNKEKINALLQEKKRFFIDDNLENKHLDTTMVSEFVGKTRAFIKIQEGCDFDCNYCIIPSVRGRARSFEERKILEQVGLLCSKGVQEVVLTGTNVGSYGKDRGSNIARLIKKLSQITGLKRIRIGSLEPNQINDEFLELLEEDFLEKHLHIALQHSHDFMLERMNRRNRTKSDRELLEIIASKNFAIGTDFIVGHPGESESVFEKAFKNLESLPLTHIHPFIYSKRKDTPSSLMRDSVSLEDSKKRLNAIKDLIFHKNKAFRQLQLKLNTPLKALVEAQKDGEFKALDQFFNPIKIKSDKPLRASFLEIKEYEIKERENHAVF

SEQ ID NO: 9323 - protein, 100 aa, Helicobacter pylori
  misc_feature (B) LOCATION 1...100
  hypothetical: YES
MQKNLDSLLENLRAEIDALDNELSDLLDKRLGIALKIALIKQESPQENPIYCPKREQEILKRLSQRGFKHLNGEILASFYAEVFKISRNFQENALKELKK

SEQ ID NO: 9324 - protein, 100 aa, Helicobacter pylori; identical to SEQ ID NO: 9323
  misc_feature (B) LOCATION 1...100
  hypothetical: YES

SEQ ID NO: 9325 - protein, 61 aa, Helicobacter pylori
  misc_feature (B) LOCATION 1...61
  hypothetical: YES
NLPVIQGIIAPNGKIIAQATKLNEVIIAEMDLNEVALQRQKIPYLQDFDTKLTKKGFGKLT

SEQ ID NO: 9326 - protein, 78 aa, Helicobacter pylori
  misc_feature (B) LOCATION 1...78
  hypothetical: YES
LVLQGAEVLIYPSAFGKARAYNWDLLSKARALENGCFVCACNHSGEETNAKLKQTLEFAGDSRNHRTQWENHRPSHQA

SEQ ID NO: 9327 - protein, 77 aa, Helicobacter pylori
  misc_feature (B) LOCATION 1...77
  hypothetical: YES
VLQGAEVLIYPSAFGKARAYNWDLLSKARALENGCFVCACNHSGEETNAKLKQTLEFAGDSRNHRTQWENHRPSHQA

SEQ ID NO: 9328 - protein, 227 aa, Helicobacter pylori
  misc_feature (B) LOCATION 1...227
  hypothetical: YES
LDFKAIEHGEETLKNETLRALSDFAKSSDTHIVACSIEKNNKKLYDSAYIIPPKGKIVGKHRKIYLWGDEKSRFKRGKKYEVFTLDFGDFSAKVGLQICYETGFGVGANLLVLQGAEVLIYPSAFGKARAYNWDLLSKARALENGCFVCACNHSGEETNAKLKQTLEFAGDSRIIAPNGKIIAQATKLNEVIIAEMDLNEVALQRQKIPYLQDFDTKLTKKGFGKLT

SEQ ID NO: 9329 - protein, 126 aa, Helicobacter pylori
  misc_feature (B) LOCATION 1...126
  hypothetical: YES
FVERVKMRFFSGFGFVNESVLFEEWLLKGAYDVSGFSMGAIKAIEYAYNEVLQQRRIHSLLLFSPCMLAHKSLAFKRLQLFLFQKDPQSYMDNFYKEVGLDAQLERFKKEGSLEELEFLLDYNDMS

SEQ ID NO: 9330 - protein, 174 aa, Helicobacter pylori
  misc_feature (B) LOCATION 1...174
  hypothetical: YES
VKMRFFSGFGFVNESVLFEEWLLKGAYDVSGFSMGAIKAIEYAYNEVLQQRRIHSLLLFSPCMLAHKSLAFKRLQLFLFQKDPQSYMDNFYKEVGLDAQLERFKKEGSLEELEFLLDYKYSDSIIRFLLEKGVKIEVFIGLKDRITDIQALLEFFMPLVQVWQFKDCNHLLQKS

SEQ ID NO: 9331 - protein, 73 aa, Helicobacter pylori
  misc_feature (B) LOCATION 1...73
  hypothetical: YES
LRMGRNGNINQYEDSFNSIINRFKTNRCDRFYLYCSLFLCALVSSLFFILKHLFWGLLVFFQAHCFVFAWQFL

SEQ ID NO: 9332 - protein, 89 aa, Helicobacter pylori
  misc_feature (B) LOCATION 1...89
  hypothetical: YES
MDEPETSLEQNALIRLSNLISLRNTQQLTSIIATHDPIVLDSCEWVLLLKNGNIAQYKPLNSILKSVAKTFNFKEKPTTKDLLALLKDI

SEQ ID NO: 9333 - protein, 222 aa, Helicobacter pylori
  misc_feature (B) LOCATION 1...222
  hypothetical: YES
MFKNALNIQDFSFKNHTSTAIIGTNGAGKSTLINTILGIRSDYNFKAQNNNIPYHDNVIPQRKQLGVVSNLFNYPPGLNANDLFKFYQFFHKNCTLDLFEKNLLNKTYEHLSDGQKQRLKIDLALSHHPQLVIMDEPETSLEQNALIRLSNLISLRNTQQLTSIIATHDPIVLDSCEWVLLLKNGNIAQYKPLNSILKSVAKTFNFKEKPTTKDLLALLKDI

SEQ ID NO: 9334 - protein, 236 aa, Helicobacter pylori
  misc_feature (B) LOCATION 1...236
  hypothetical: YES
GDFIISNISIHPKTMFKNALNIQDFSFKNHTSTAIIGTNGAGKSTLINTILGIRSDYNFKAQNNNIPYHDNVIPQRKQLGVVSNLFNYPPGLNANDLFKFYQFFHKNCTLDLFEKNLLNKTYEHLSDGQKQRLKIDLALSHHPQLVIMDEPETSLEQNALIRLSNLISLRNTQQLTSIIATHDPIVLDSCEWVLLLKNGNIAQYKPLNSILKSVAKTFNFKEKPTTKDLLALLKDI

SEQ ID NO: 9335 - protein, 60 aa, Helicobacter pylori
  misc_feature (B) LOCATION 1...60
  hypothetical: YES
YREMDYAVFSMTIHPDVSARPQVLLMHEKIIEHINQHEGVAWVTFNEIADDFLKRNPRKK

SEQ ID NO: 9336 - protein, 59 aa, Helicobacter pylori
  misc_feature (B) LOCATION 1...59
  hypothetical: YES
REMDYAVFSMTIHPDVSARPQVLLMHEKIIEHINQHEGVAWVTFNEIADDFLKRNPRKK

SEQ ID NO: 9337 - protein, 293 aa, Helicobacter pylori
  misc_feature (B) LOCATION 1...293
  hypothetical: YES
MAKEILVAYGVDIDAVAGWLGSYGGEDSPDDISRGLFAGEVGIPRLLKLFKKYHLPATWFAPGHSIETFPEPMKMIVDAGHEVGAHGYSHENPIAMTAKQEEDVLLKSVELIKDLTGKAPTGYVAPWWEFSNITNELLLKHGFKYDHSLMHNDFTPYFVRVGDSWSKIDYSLEAKDWMKPLIRGVETNLVEIPANWYLDDLPPMMFIKKSPNSFGFVSPRDIGQMWIDQFDWVYREMDYAVFSMTIHPDVSARPQVLLMHEKIIEHINQHEGVRWVTFNEIADDFLKRNPRKK

SEQ ID NO: 9338 - protein, 100 aa, Helicobacter pylori
  misc_feature (B) LOCATION 1...100
  hypothetical: YES
MLEIELKKKFTKDLKKHILNQKIELEVFDLVVENLRNQIPLDKRFKDHALSGTYKGCRERHIKPDVLLVYRVKGNVLTLVRLGSHSELFCKPPTPLITLK

SEQ ID NO: 9339 - protein, 100 aa, Helicobacter pylori; identical to SEQ ID NO: 9338
  misc_feature (B) LOCATION 1...100
  hypothetical: YES

SEQ ID NO: 9340 - protein, 174 aa, Helicobacter pylori
  misc_feature (B) LOCATION 1...174
  hypothetical: YES
LNTMNSVLECKELALYGGSFDPLHKAHLAIIEQTLELLPFVQLIVLPAYQNPFKKPCFLDAKTRFKELERALKGMPRVLLSDFEIKQERAVPTIESVLHFQKLYRPKTLYLVIGADCLRHLSSWTNAKELLKRVELVVFERIGYEEIQFKGRYHPLKGIDAPISSSAIRASLGV

SEQ ID NO: 9341 - protein, 179 aa, Helicobacter pylori
  misc_feature (B) LOCATION 1...179
  hypothetical: YES
LRRLALNTMNSVLECKELALYGGSFDPLHKAHLAIIEQTLELLPFVQLIVLPAYQNPFKKPCFLDAKTRFKELERALKGMPRVLLSDFEIKQERAVPTIESVLHFQKLYRPKTLYLVIGADCLRHLSSWTNAKELLKRVELVVFERIGYEKIQFKGRYHPLKGIDAPISSSAIRASLGV

SEQ ID NO: 9342 - protein, 376 aa, Helicobacter pylori
  misc_feature (B) LOCATION 1...376
  hypothetical: YES
MRFFCFFLFFLTFSNAQIMMTFDSQTNAKLSRSNEQLSDMLYKLNESLRIYQNVLSNNQDQLKEIKKANSTLTSQRRFFNASQIRLMDTDALLKQSALELEKLQALEKHLKESMEHERLIKESQALFLQEHCPYLSGVKNLEEASNALEVQEKNNALFLLKEPKLFHLLSRLDLMSALNALCDQVLENEIQDQQSHNKTLEYNALMNHDFQAYKAMRLKKIKNKLQSQIQAKEDALKTFLPLEKRLETLKSRFLCDKENLKSCANQLQQRYQNALIERDKELKNAKNNKEKHALILANYEHTLKTLNIEFLSELSEQMAFLNETMALNAQVLALLAQQQTKKPFNVSDGLSGGKALIKNIRLDPHGFPSFKNFKQE

SEQ ID NO: 9343 - protein, 384 aa, Helicobacter pylori
  misc_feature (B) LOCATION 1...384
  hypothetical: YES
NYSNKDNPMRFFCFFLFFLTFSNAQIMMTFDSQTNAKLSRSNEQLSDMLYKLNESLRIYQNVLSNNQDQLKEIKKANSTLTSQRRFFNASQIRLMDTDALLKQSALELEKLQALEKHLKESMEHERLIKESQALFLQEHCPYLSGVKNLEEASNALEVQEKNNALFLLKEPKLFHLLSRLDLMSALNALCDQVLENEIQDQQSHNKTLEYNALMNHDFQAYKAMRLKKIKNKLQSQIQAKEDALKTFLPLEKRPETLGSSDCCDKENLKSCANQLQQRYQNALIERDKELKNAKNNKEKHALILANYEHTLKTLNIEFLSELSEQMAFLNETMALNAQVLALLAQQQTKKPFNVSDGLSGGKALIKNIRLDPHGFPSFKNFKQE

SEQ ID NO: 9344 - protein, 360 aa, Helicobacter pylori
  misc_feature (B) LOCATION 1...360
  hypothetical: YES
MNGFCARLRAITFNERLKMKIAVLLSGGVDSSYSAYSLKEQGHELVGIYLKLHASEKKHDLYIKNAQKACEFLGIPLEVLDFQKDFKSAVYDEFINAYEEGQTPNPCALCNPLMKFGLALDHALKLGCEKIATGHYARVKEIDKVSYIQEALDKTKDQSYFLYALEHEVIAKLVFPLGDLLKKDIKPLALNAMPFLGTLETYKESQEICFVEKSYIDTLKKHVEVEKEGVVKNLQGEVIGTHKGYMQYTIGKRKGFSVKGALEPHFVVGIDAKKNELIVGKKEDLATHSLKAKNKSLTKDFKDGEYFIKARYRSVPTKAFVSLKDGMIEVEFKEPFYGVAKGQALVVYKDDILLGGGVIV

SEQ ID NO: 9345 - protein, 364 aa, Helicobacter pylori
  misc_feature (B) LOCATION 1...364
  hypothetical: YES
KKVVMNGFCARLRAITFNERLKMKIAVLLSGGVDSSYSAYSLKEQGHELVGIYLKLHASEKKHDLYIKNAQKACEFLGIPLEVLDFQKDFKSAVYDEFINAYEEGQTPNPCALCNPLMKFGLALDHALKLGCEKIATGHYARVKEIDKVSYIQEALDKTKDQSYFLYALEHEVIAKLVFPLGDLLKKDIKPLALNAMPFLGTLETYKESQEICFVEKSYIDTLKKHVEVEKEGVVKNLQGEVIGTHKGYMQYTIGKRKGFSVKGALEPHFVVGIDAKKNELIVGKKEDLATHSLKAKNKSLTKDFKDGEYFIKARYRSVPTKAFVSLKDGMIEVEFKEPFYGVAKGQALVVYKDDILLGGGVIV

SEQ ID NO: 9346 - protein, 63 aa, Helicobacter pylori
  misc_feature (B) LOCATION 1...63
  hypothetical: YES
RKRGSRSEYLADQFCQVGLFKDFPKEYRARELHKTLDDNLTNHNLQASSSPMIKGAWQETLRN

SEQ ID NO: 9347 - protein, 105 aa, Helicobacter pylori
  misc_feature (B) LOCATION 1...105
  hypothetical: YES
SSSVKLPNDQRRMAGNAKELASVVIDYLLENAREAFESYTDDESQKYIYWSKAKAEARDRDGTLVVPFEKYGFYFVSNASYQTTGSNLKDLILGCNLNPRDFVVE

SEQ ID NO: 9348 - protein, 109 aa, Helicobacter pylori
  misc_feature (B) LOCATION 1...109
  hypothetical: YES
MQNRSHEIQGVSHIKNNYKFFTKELDNYISKGYRIEEIYGAFLWLKIVAIGLELGEDDPQVVFESINATGVQLKGLDLIRNYLMMGENXDNQNRLYNTYWVPLENWLGE

SEQ ID NO: 9349 - protein, 335 aa, Helicobacter pylori
  misc_feature (B) LOCATION 1...335
  hypothetical: YES
EPIKSDKEAFDLVMQNRSHEIQGVSHIKNNYKFFTKELDNYISKGYRIEEIYGAFLWLKIVAIGLELGEDDPQVVFESINATGVQLKGLDLIRNYLMMGENSDNQNRLYNTYWVPLENWLGEKDLNDFIKTYLRIYFEDRVKEGEREVYYALKAHHRDNFPNNIQGLMSDMREYGRIFQIFLDRDHYFLHRGDPQQLANLRLRVKDLVKIKFGVAKPFVLRCARDFEEGKLDYENFHEILQILISYFVRRSVCGDSTPTLTRVLYSLYRQLGEDVSADALKRYLGKSVGQMAFPNDDKIKAAFLVRNAYAANQVCKFILLEIEKLATLNRQKKRI

SEQ ID NO: 9350 - protein, 683 aa, Helicobacter pylori
  misc_feature (B) LOCATION 1...683
  hypothetical: YES
MKATQSTINDFFALTGTIFSIPVYQRNYTWEEENCEKLLQDIVNISQNKKTHFMGSITYILHLIDDEKSLRQLQEFVIIDGQQRITTIMLLLKAIETKIQNEGIKKEIDGLLNLSGQRLRLKPIKSDKEAFDLVMQNRSHEIQGVSHIKNNYKFFTKELDNYISKGYRIEEIYGAFLWLKIVAIGLELGEDDPQVVFESINATGVQLKGLDLIRNYLMMGENSDNQNRLYNTYWVPLENWLGEKDLNDFIKTYLRIYFEDRVKEGEREVYYALKAHHRDNFPNNIQGLMSDMREYGRIFQIFLDRDHYFLHRGDPQQLANLRLRVKDLVKIKFGVAKPFVLRCARDFEEGKLDYENFHEILQILISYFVRRSVCGDSTPTLTRVLYSLYRQLGEDVSADALKRYLGKSVGQMAFPNDDKIKAAFLVRNAYAANQVCKFILLEIEKLSNAEPPKEENLEVEHFYPKTPTQEWRDRVGDYFTFEQDYLNNFGNLTLSGQNQRLGNKSYEAKIALMEEYSSLHLNDYFTNNTDSWGIEEVRARSEYLADQFCQVGLFKDLPKEYRARELHKTLDDNLTNHNLQSVKLPNDQRRMAGNAKELASVVIDYLLENAREAFESYTDDESQKYIYWSKAKAEARDRDGTLVVPFEKYGFYFVSNASYQTTGSNLKDLILGCNLNPRDFVVE

SEQ ID NO: 9351 - protein, 79 aa, Helicobacter pylori
  misc_feature (B) LOCATION 1...79
  hypothetical: YES
MFEKIRKILADIEDSQNEIEMLLKLANLSLGDFIEIKRGSMDMPKGVNEAFFTQLSEEVERLKELINALNKIKKGLLVF

SEQ ID NO: 9352 - protein, 231 aa, Helicobacter pylori
  misc_feature (B) LOCATION 1...231
  hypothetical: YES
MIDNLDGAKDAQLIKKAYAFLCLGGDGTILGALRMTHAHNKPCFGVRIGNLGFLSAVELNGLKDFLQDLKQNRIKLEEHLALEGRIGNTSFYAINEIVIAKKKALGVLDIKACAGHTPFNTYKGDGLIIATPLGSTAYNLSAHGPIVHALSQSYILTPLCDFSLTQRPLVLGAEFCLSFCAHEDALVVIDGQATYDLKANQPLYIQKSPTTTKLLQKNSRDYFKVLKEKLL

SEQ ID NO: 9353 - protein, 307 aa, Helicobacter pylori
  misc_feature (B) LOCATION 1...307
  hypothetical: YES
MIKKAAKTPFFKILFQALSYNIRMKDLNKTIGVFVRPTHHQNALFKELEQAKEWVLTLLEDEGFESFMIDSLDGAKDAQLIKKAYAFLCLGGDGTILGALRMTHAHNKPCFGVRIGNLGFLSAVELNGLKDFLQDLKQNRIKLEEHLALEGRIGNTSFYAINEIVIAKKKALGVLDIKACAGHTPFNTYKGDGLIIATPLGSTAYNLSAHGPIVHALSQSYILTPLCDFSLTQRPLVLGAEFCLSFCAHEDALVVIDGQATYDLKANQPLYIQKSPTTTKLLQKNSRDYFKVLKEKLLWGESPNKKR

SEQ ID NO: 9354 - protein, 315 aa, Helicobacter pylori
  misc_feature (B) LOCATION 1...315
  hypothetical: YES
KLLRVLHKMIKKAAKTPFFKILFQALSYNIRMKDLNKTIGVFVRPTHHQNALFKELEQAKEWVLTLLEDEGFESFMIDSLDGAKDAQLIKKAYAFLCLGGDGTILGALRMTHAHNKPCFGVRIGNLGFLSAVELNGLKDFLQDLKQNRIKLEEHLALEGRIGNTSFYAINEIVIAKKKALGVLDIKACAGHTPFNTYKGDGLIIATPLGSTAYNLSAHGPIVHALSQSYILTPLCDFSLTQRPLVLGAEFCLSFCAHEDALVVIDGQATYDLKANQPLYIQKSPTTTKLLQKNSRDYFKVLKEKLLWGESPNKKR

SEQ ID NO: 9355 - protein, 68 aa, Helicobacter pylori
  misc_feature (B) LOCATION 1...68
  hypothetical: YES
KSHVSLGKFTQNPTEQPPTITTPFNGKTENILMDRILVIGIEPNKITLFLDDLIKSVGNKDFADLSSL

SEQ ID NO: 9356 - protein, 86 aa, Helicobacter pylori
  misc_feature (B) LOCATION 1...86
  hypothetical: YES
MSLGAVVSSLLCHKLEGAILDLRAYRXXAYYHENKDTLLIKGKKRLLYNYIKAHIXLNLLWTIRNRTXSLGKFTQNPTEQPPTNNH

SEQ ID NO: 9357 - protein, 227 aa, Helicobacter pylori
  misc_feature (B) LOCATION 1...227
  hypothetical: YES
MQDLQHFKNDITLILSKDRLDTYDSLEQYKENLKLISFITPKISNLEIYLRNALDYCLTQIKGSEWVFNENSLTDLINEQKEKKKEITHSLILSKMSLGAVVRLIFCYKLEGVILDLRAYRLRAYYHENKDTLLIKGKKRLLYNYIKAHIALNLLWTIRNRTYHWENLLKIQPNNRPRITTPFNGKTENILMDRILVIGIEPNKITLFLDDLIKSVGNKDFADLSSL

SEQ ID NO: 9358 - protein, 489 aa, Helicobacter pylori
  misc_feature (B) LOCATION 1...489
  hypothetical: YES
VRFENFINRLAFYMATGSGKTIVIIKLVELLSVAMGMGLIPKKNIMFFSANEHLIKQFEKEIEKYNRNKDYSKQIDFKNLKSVKNKDFYRAPKDSLMKEIALFYYRADLMSDEESKENLLNYKDCWDNGENYVILDEAHKGNKTESKRQAIFSLLSLKGFLFNFSATFTEESDLITAVYNLSVGEWVKLGYGKESVLLKKNNLNAFKELKDLNDREKEIALLKALLLLGMQKRYKVEGYFHDPLMLVFTHSVNMENSDAXIFFKTLARVIENDDESDFSKAKDDLLEELKNPEFLFSDGKDKEKDYKIEVFKESLKGMDFKGLKEAVFYASNGHIEVIINPKNNQEIAFKLNTSDKVFCLIRIGDITEWIREKLKSVKVVSKNLSFKEESYFSQIDKSSINILVGSRAFDTGWDSTRPSVILFLNIGLDDDAKKLVKQSFGRGVRIESVKNQRQRLAYLEIDEAIKEQAETKRCNAGNAFCDTYQPCKP

SEQ ID NO: 9359 - protein, 957 aa, Helicobacter pylori
  misc_feature (B) LOCATION 1...957
  hypothetical: YES
GKIMAKKKQEVRNNEIFVAQKLAEEELNANEINDPLEMLDFKSFDDNKELLDYQQQALINAFRVLVAYFRDFKESKKEFYAFYQKHYSFANCDFAKKKLNHLLKSHFKVENHCVRFENFINRLAFYMATGSGKTIVIIKLVELLSVAMGMGLIPKKNIMFFSANEHLIKQFEKEIEKYNRNKDYSKQIDFKNLKSVKNKDFYRAPKDSLMKEIALFYYRADLMSDEESKENLLNYKDCWDNGENYVILDEAHKGNKTESKRQAIFSLLSLKGFLFNFSATFTEESDLITAVYNLSVGEWVKLGYGKESVLLKKNNLNAFKELKDLNDREKEIALLKALLLLGMQKRYKVEGYFHDPLMLVFTHSVNMENSDAEIFFKTLARVIENDDESDFSKAKDDLLEELKNPEFLFSDGKDKEKDYKIEVFKESLKGMDFKGLKEAVFYASNGHIEVIINPKNNQEIAFKLNTSDKVFCLIRIGDITEWIREKLKSVKVVSKNLSFKEESYFSQIDKSSINILVGSRAFDTGWDSTRPSVILFLNIGLDDDAKKLVKQSFGRGVRIESVKNQRQRLAYLEIDEAIKDKLKPNAAMLEMLFVIPTNHASLEAILKFQKESENGGENRGPWREIKLEKTRIEHALFVPCYRKEQTNALKISQSASFKMSEKNFKDLKEHFHLMSEKHFILKHEIYDPKDYALLKEMIQTAHFKKVSTWHYKDLDYMISEIKGKLYPNQKVPKDEFNALDNEKIVHFKRVKVKADKKEKLIQTIQEVKEHAPLDKETLRKKIAQGEIDPYDTEKHKQDRTFKVGDAELLKLKEHYYTPLIKAKNCDWLKHVVKVKSESDFLEELLKITETLQENYDFWAFSKIDEHLDNLFIPYIDNATERRFFPDFIFWLQKGGTQIICFIDPKGSKHTDYEHKADAYQLFEDKVFNPKDDPNLKIKVVLKFYGDKDDVGERYRDL

SEQ ID NO: 9360 - protein, 972 aa, Helicobacter pylori
  misc_feature (B) LOCATION 1...972
  hypothetical: YES
MAKKKQEVRNNEIFVAQKLAEEELNANEINDPLEMLDFKSFDDNKELLDYQQQALINAFRVLVAYFRDFKESKKEFYAFYQKHYSFANCDFAKKKLNHLLKSHFKVENHCVRFENFINRLAFYMATGSGKTIVIIKLVELLSVAMGMGLIPKKNIMFFSANEHLIKQFEKEIEKYNRNKDYSKQIDFKNLKSVKNKDFYRAPKDSLMKEIALFYYRADLMSDEESKENLLNYKDCWDNGENYVILDEAHKGNKTESKRQAIFSLLSLKGFLFNFSATFTEESDLITAVYNLSVGEWVKLGYGKESVLLKKNNLNAFKELKDLNDREKEIALLKALLLLGMQKRYKVEGYFHDPLMLVFTHSVNMENSDAEIFFKTLARVIENDDESDFSKAKDDLLEELKNPEFLFSDGKDKEKDYKIEVFKESLKGMDFKGLKEAVFYASNGHIEVIINPKNNQEIAFKLNTSDKVFCLIRIGDITEWIREKLKSVKVVSKNLSFKEESYFSQIDKSSINILVGSRAFDTGWDSTRPSVILFLNIGLDDDAKKLVKQSFGRGVRIESVKNQRQRLAYLEIDEAIKDKLKPNAAMLEMLFVIPTNHASLEAILKFQKESENGGENRGPWREIKLEKTRIEHALFVPCYRKEQTNALKISQSASFKMSEKNFKDLKEHFHLMSEKHFILKHEIYDPKDYALLKEMIQTAHFKKVSTWHYKDLDYMISEIKGKLYPNQKVPKDEFNALDNEKIVHFKRVKVKADKKEKLIQTIQEVKEHAPLDKETLRKKIAQGEIDPYDTEKHKQDRTFKVGDAELLKLKEHYYTPLIKAKNCDWLKHVVKVKSESDFLEELLKITETLQENYDFWAFSKIDEHLDNLFIPYIDNATERRFFPDFIFWLQKGGTQIICFIDPKGSKHTDYEHKADAYQLFEDKVFNPKDDPNLKIKVVLKFYGDKDDVGERYRDLWIEKGKLEYFFSGFKGLA

SEQ ID NO: 9361 - protein, 104 aa, Helicobacter pylori
  misc_feature (B) LOCATION 1...104
  hypothetical: YES
LLLHPLHAHAQVLGFTNHDHAPWLYDFIKSFCNLSGQPFLDLQAFAINFNEFSDRANAYNLFLRDISHANIPKKREQMVLASGVKFNVLSHYHFIANALKIRAF

SEQ ID NO: 9362 - protein, 165 aa, Helicobacter pylori
  misc_feature (B) LOCATION 1...165
  hypothetical: YES
MIELILHNKSIQIDETLLNVKEHLEKFYSNKEQETIAKTLESQTELTCSYLLDKDFSLLEKHLENSLGHFTFESEFALLKDKEPLNLAQIKQIGVLKVITYEMTQALKNQIIHLTQIVNEENLEFDEELVIYHLNFKLNQNTYKVLAKFCVLKKKGTLHEKFKAF

SEQ ID NO: 9363 - protein, 168 aa, Helicobacter pylori
  misc_feature (B) LOCATION 1...168
  hypothetical: YES
RKTMIELILHNKSIQIDETLLNVKEHLEKFYSNKEQETIAKTLESQTELTCSYLLDKDFSLLEKHLENSLGHFTFESEFALLKDKEPLNLAQIKQIGVLKVITYEMTQALKNQIIHLTQIVNEENLEFDEELVIYHLNFKLNQNTYKVLAKFCVLKKKGTLHEKFKAF

SEQ ID NO: 9364 - protein, 213 aa, Helicobacter pylori
  misc_feature (B) LOCATION 1...213
  hypothetical: YES
MDTETQEKFLAYLFEKALQKNLQAYWITTTETKNELTREEFSNLIRKTMIELILHNKSIQIDETLLNVKEHLEKFYSNKEQETIAKTLESQTELTCSYLLDKDFSLLEKHLENSLGHFTFESEFALLKDKEPLNLAQIKQIGVLKVITYEMTQALKNQIIHLTQIVNEENLEFDEELVIYHLNFKLNQNTYKVLAKFCVLKKKGTLHEKFKAF

SEQ ID NO: 9365 - protein, 314 aa, Helicobacter pylori
  misc_feature (B) LOCATION 1...314
  hypothetical: YES
MDLDKLKDYRALRNAILRLLPYLDSGITELIMNKEKEIWLYKLNGVREKVFDENLDKAFILGFGEQLASFRDLFFNANYPTLNTSIPTSRYRVSMNHFAISADNELSLNIRVPSDKKFDLKAFKLSSICQYDYEYLKNLMIDGKNLLISGGTGSGKTSFLNALIEFIPKHTRIVSVEDSEELDLRAFENHKSLLVDKTESSKFTYENALNMAMRMSPDRLMVGEIDTRNSMLFLRFGNTGHKGMVSTLHADSVHGVIEAIALNLQMNKSGLDVNVAKKFFKSSVDVVVQIVLDKATNTRYIQEILPAKDLRDSL

SEQ ID NO: 9366 - protein, 319 aa, Helicobacter pylori
  misc_feature (B) LOCATION 1...319
  hypothetical: YES
KESNSMDLDKLKDYRALRNAILRLLPYLDSGITELIMNKEKEIWLYKLNGVREKVFDENLDKAFILGFGEQLASFRDLFFNANYPTLNTSIPTSRYRVSMNHFAISADNELSLNIRVPSDKKFDLKAFKLSSICQYDYEYLKNLMIDGKNLLISGGTGSGKTSFLNALIEFIPKHTRIVSVEDSEELDLRAFENHKSLLVDKTESSKFTYENALNMAMRMSPDRLMVGEIDTRNSMLFLRFGNTGHKGMVSTLHADSVHGVIEAIALNLQMNKSGLDVNVAKKFFKSSVDVVVQIVLDKATNTRYIQEILPAKDLRDSL

SEQ ID NO: 9367 - protein, 172 aa, Helicobacter pylori
  misc_feature (B) LOCATION 1...172
  hypothetical: YES
MKKYQNKRKLGKRINCFISNECKDILENYLKVKKISVTECIESLLLALDPSKETLRARDFYESLFKVISLNQHVYKELMANGNNINQIAKNTNIAIKYNKPFYLQNLAFLEEIFKVMDTLNKNVEECKKISLELLLQIYKEQKSQTEFNAISKILNALNEKQSTTEPKKDNA

SEQ ID NO: 9368 - protein, 173 aa, Helicobacter pylori
  misc_feature (B) LOCATION 1...173
  hypothetical: YES
SMKKYQNKRKLGKRINCFISNECKDILENYLKVKKISVTECIESLLLALDPSKETLRARDFYESLFKVISLNQHVYKELMANGNNINQIAKNTNIAIKYNKPFYLQNLAFLEEIFKVMDTLNKNVEECKKISLELLLQIYKEQKSQTEFNAISKILNALNEKQSTTEPKKDNA

SEQ ID NO: 9369 - protein, 320 aa, Helicobacter pylori
  misc_feature (B) LOCATION 1...320
  hypothetical: YES
MNTNLKKALFLTTLGYLQANEGFLAIMPDENKQEDISQEQKLEHKMEQKIAPQNTLKKQQSAPLQSAELLQSQVKREVKEQKKSQKHLVAMQTKNGFFLGSEIAITGTSLKQSLSLISNATDDLLTYSKTSKNANFNMGLLIGYQHYFGASKRHGIKISSHLYGGTPSDVSTDIKIYKSKVSTNYTPLNFGIDVKYLFDFLNVIKKNRHTLGLSVGFGWRMQYYFAKIDPIKTSHSEFITNKPKDIFNHGFYPTIGLHYYLNHHQFEVNYRFGGAINYQSVVPSKIVVQNGNFKGEVLFSNFLTKATNSSYIAFNYAYLF

SEQ ID NO: 9370 - protein, 324 aa, Helicobacter pylori
  misc_feature (B) LOCATION 1...324
  hypothetical: YES
ERKKMNTNLKKALFLTTLGYLQANEGFLAIMPDENKQEDISQEQKLEHKMEQKIAPQNTLKKQQSAPLQSAELLQSQVKREVKEQKKSQKHLVAMQTKNGFFLGSEIAITGTSLKQSLSLISNATDDLLTYSKTSKNANFNMGLLIGYQHYFGASKRHGIKISSHLYGGTPSDVSTDIKIYKSKVSTNYTPLNFGIDVKYLFDFLNVIKKNRHTLGLSVGFGWRMQYYFAKIDPIKTSHSEFITNKPKDIFNHGFYPTIGLHYYLNHHQFEVNYRFGGAINYQSVVPSKIVVQNGNFKGEVLFSNFLTKATNSSYIAFNYAYLF

SEQ ID NO: 9371 - protein, 167 aa, Helicobacter pylori
  misc_feature (B) LOCATION 1...167
  hypothetical: YES
LYSYLFLVVTIERMESRINRLSAKIDALLEQQKKVISLLETYLSVYSTPQEASNKLFKGISQGMELAPEIAQEDEEKRLYVLQYLSHVDITKNKQDSQLKKDCLEFIQRFNIPKPIIVTALYNLKGIKPTKKEVAKQLQKLYVWERRYQQGGIDALKDRRGRPLKKP

SEQ ID NO: 9372 - protein, 173 aa, Helicobacter pylori
  misc_feature (B) LOCATION 1...173
  hypothetical: YES
MGLKNKIKGFVKERMPFVMRCVRGLKGAKDTHENAHDRDAYCGINREIKEMLEAKKLHFLQEKALFNHDHQESVFLAIASLNNESFIEYNKSIYKNSSLNYNYGGHLEDRVIHPTLTLPNPTHSGYFDYDKKSQNPKSPLNPWAFIRVKNEIVTLEESLFSMLPAVQRGGHWF

SEQ ID NO: 9373 - protein, 187 aa, Helicobacter pylori
  misc_feature (B) LOCATION 1...187
  hypothetical: YES
GFVCGSVLFQLGVFMGLKNKIKGFVKERMPFVMRCVRGLKGAKDTHENAHDRDAYCGINREIKEMLEAKKLHFLQEKALFNHDHQESVFLAIASLNNESFIEYNKSIYKNSSLNYNYGGHLEDRVIHPTLTLPNPTHSGYFDYDKKSQNPKSPLNPWAFIRVKNEIVTLEESLFSMLPAVQRGGHWF

SEQ ID NO: 9374 - protein, 175 aa, Helicobacter pylori
  misc_feature (B) LOCATION 1...175
  hypothetical: YES
LWHQLYHYCNYTLSFIPKNEWVVKIDCDHIYDAKKLYKSFYIPKNIKEVVMYSRINFVVRDFEVFVRNDGDFGFLDAWGDHWLLYNDCEPFEIWRYNDESYEVLKLKDKHHIKDKEMVQWHFPLAKKRRNAIVYDDLIPLEEFKKRHADLIGTRIEESMLDEKRILEVYQKFRLP

SEQ ID NO: 9375 - protein, 230 aa, Helicobacter pylori
  misc_feature (B) LOCATION 1...230
  hypothetical: YES
KRVCFLCFLPFKGGVIGFNDCDDGSKEVVLEFCKKFPSFIPISYPYEVILKDCPSLWHQLYHYCNYTLSFIPKNEWVVKIDCDHIYDAKKLYKSFYIPKNIKEVVMYSRINFVVRDFEVFVRNDGDFGFLDAWGDHWLLYNDCEPFEIWRYNDESYEVLKLKDKHHIKDKEMVQWHFPLAKKRRNAIVYDDLIPLEEFKKRHADLIGTRIEESMLDEKRILEVYQKFRLP

SEQ ID NO: 9376 - protein, 86 aa, Helicobacter pylori
  misc_feature (B) LOCATION 1...86
  hypothetical: YES
MKTTENTDETHLRETKNKLGRKPKADANKKTRAVSLYFSDEQYQKLEKMANEEEESVGSYIKRYILKALRKIEQGGGFIAFNLFLI

SEQ ID NO: 9377 - protein, 89 aa, Helicobacter pylori
  misc_feature (B) LOCATION 1...89
  hypothetical: YES
RNLMKTTENTDETHLRETKNKLGRKPKADANKKTRAVSLYFSDEQYQKLEKMANEEEESVGSYIKRYILKALRKIEQGGGFIAFNLFLI

SEQ ID NO: 9378 - protein, 340 aa, Helicobacter pylori
  misc_feature (B) LOCATION 1...340
  hypothetical: YES
MYRKDLDNYLKQRLPKAVFLYGEFDFFIHYYIQTISALFKGNNPDTETSLFYASDYEKSQIATLLEQDSLFGGSSLVILKLDFALHKKFKENDINPFLKALERPSHNRLIIGLYNAKSDTTKYKYTSEIIVKFFQKSPLKDEAICVRFFTPKAWESLKFLQERANFLHLDISGHLLNALFEINNEDLSVSFNDLDKLAVLNAPITLEDIQELSSNAGDMDLQKLILGLFLKKSVLDIYDYLLKEGKKDADILRGLERYFYQLFLFFAHIKTTGLMDAKEVLGYAPPKEIVENYAKNALRLKEAGYKRVFEIFRLWHLQSMQGQKELGFLYLTPIQKIINP

SEQ ID NO: 9379 - protein, 353 aa, Helicobacter pylori
  misc_feature (B) LOCATION 1...353
  hypothetical: YES
GKLEAKSQKGLKSMYRKDLDNYLKQRLPKAVFLYGEFDFFIHYYIQTISALFKGNNPDTETSLFYASDYEKSQIATLLEQDSLFGGSSLVILKLDFALHKKFKENDINPFLKALERPSHNRLIIGLYNAKSDTTKYKYTSEIIVKFFQKSPLKDEAICVRFFTPKAWESLKFLQERANFLHLDISGHLLNALFEINNEDLSVSFNDLDKLAVLNAPITLEDIQELSSNAGDMDLQKLILGLFLKKSVLDIYDYLLKEGKKDADILRGLERYFYQLFLFFAHIKTTGLMDAKEVLGYAPPKEIVENYAKNALRLKEAGYKRVFEIFRLWHLQSMQGQKELGFLYLTPIQKIINP

SEQ ID NO: 9380 - protein, 50 aa, Helicobacter pylori
  misc_feature (B) LOCATION 1...50
  hypothetical: YES
LTALYSVSKKGIDLNTDFSHITDIEGMRFVNEEDALNKLINEIHTRPHWI

SEQ ID NO: 9381 - protein, 117 aa, Helicobacter pylori
  misc_feature (B) LOCATION 1...117
  hypothetical: YES
RSLLSHIYQYRKGNAIKSLKDKNIFIVDRGIETGFRAGLGVQTCLKKECQDIYILTPILAQNVAQGLESLCDGVISVYRPECFVSVEHHYKELKRLSNEEIEKYLGANNAPNLKKEH

SEQ ID NO: 9382 - protein, 234 aa, Helicobacter pylori
  misc_feature (B) LOCATION 1...234
  hypothetical: YES
LNTDFSHITDIEGMRFVNEEDALNKLINEIHTRHIDLKDSIMLALSFNALYLANALAQKFGATYDILFLEPILAPLNSKCEIALVSESMDIVMNESLINSFDIALDYVYGEAKRAYEEDILSHIYQYRKGNAIKSLKDKNIFIVDRGIETGFRAGLGVQTCLKKECQDIYILTPILAQNVAQGLESLCDGVISVYRPECFVSVEHHYKELKRLSNEEIEKYLGANNAPNLKKEH

SEQ ID NO: 9383 - protein, 103 aa, Helicobacter pylori
  misc_feature (B) LOCATION 1...103
  hypothetical: YES
IFSSRCAKHALNLHFMKGFVMSGLRTFSCVVVLCGAMANVAIAGPKIEARGEFGKFWGGAVGGAIGGGVGGAMGGAVGGPAGWLGWQISWWFCGERVWSGNRR

SEQ ID NO: 9384 - protein, 462 aa, Helicobacter pylori
  misc_feature (B) LOCATION 1...462
  hypothetical: YES
MNTSHKTLKTIAILGQPNVGKSSLFNRLARERIAITSDFAGTTRDINKRKIALNGHEVELLDTGGMAKDALLSKEIKALNLKAAQMSDLILYVVDGKSIPSDEDLKLFREVFKTNPNCFLVINKIDNDKEKERSYAFSSFGTPKSFNISVSHNRGISALIDAVLNALNLNQIIEQDLDADILESLETPNNALEETKEEEIIQVGIIGRVNVGKSSLLNALTKKERSLVSSVAGTTIDPIDETILIGDQKICFVDTAGIRHRGKILGIEKYALDRTQKALEKSHIALLVLDVSAPFVELDEKISSLADKHSLGIILILNKWDIRYAPYEEIMATLKRKFRFLEYAPVITTSCLKARHIDEIKHKIIEVYECFSKRIPTSSLNSVIFQATQKHPLPSDGGKLVKVYYATQFATKPPQISLIMNRPKALHFSYKRYLINTLRKEFNFLGTPLILNAKDKKSVQQN

SEQ ID NO: 9385 - protein, 468 aa, Helicobacter pylori
  misc_feature (B) LOCATION 1...468
  hypothetical: YES
IEAIKKMNTSHKTLKTIAILGQPNVGKSSLFNRLARERIAITSDFAGTTRDINKRKIALNGHEVELLDTGGMAKDALLSKEIKALNLKAAQMSDLILYVVDGKSIPSDEDLKLFREVFKTNPNCFLVINKIDNDKEKERSYAFSSFGTPKSFNISVSHNRGISALIDAVLNALNLNQIIEQDLDADILESLETPNNALEETKEEEIIQVGIIGRVNVGKSSLLNALTKKERSLVSSVAGTTIDPIDETILIGDQKICFVDTAGIRHRGKILGIEKYALDRTQKALEKSHIALLVLDVSAPFVELDEKISSLADKHSLGIILILNKWDIRYAPYEEIMATLKRKFRFLEYAPVITTSCLKARHIDEIKHKIIEVYECFSKRIPTSSLNSVIFQATQKHPLPSDGGKLVKVYYATQFATKPPQISLIMNRPKALHFSYKRYLINTLRKEFNFLGTPLILNAKDKKSVQQN

SEQ ID NO: 9386 - protein, 71 aa, Helicobacter pylori
  misc_feature (B) LOCATION 1...71
  hypothetical: YES
IYFSAKRFNTKNTHGTGCTLSSLIVGLLAQGLDLKNAITKAKELLTIIIQNPLNIGHGHGPLNLWSIKKHV

SEQ ID NO: 9387 - protein, 154 aa, Helicobacter pylori
  misc_feature (B) LOCATION 1...154
  hypothetical: YES
LLEMIFRSRRSKWGALCNAQIIECVANALETCDFGLCVLDPVMVAKNGALLLEEEAILSLKKRLLPKTNLLTPNLPEVYALTGVQARDDKSASKAMGVLRDLGVKNAVIKGGHTEHFQGEFSNDWVFLEDAEFTLAPSDSTPKTRMARVVLCLA

SEQ ID NO: 9388 - protein, 245 aa, Helicobacter pylori
  misc_feature (B) LOCATION 1...245
  hypothetical: YES
LKAFQTFGVFGTSVITCITAQNTQGVHGVYPLSVESVKAQILAIRDDFSIKAFKMGALCNAQIIECVANALETCDFGLCVLDPVMVAKNGALLLEEEAILSLKKRLLPKTNLLTPNLPEVYALTGVQARDDKSASKAMGVLRDLGVKNAVIKGGHTEHFQGEFSNDWVFLEDAEFTLSAKRFNTKNTHGTGCTLSSLIVGLLAQGLDLKNAITKAKELLTIIIQNPLNIGHGHGPLNLWSIKKHV

SEQ ID NO: 9389 - protein, 269 aa, Helicobacter pylori
  misc_feature (B) LOCATION 1...269
  hypothetical: YES
VKVYPQVLSIAGSDSGGGAGIQADLKAFQTFGVFGTSVITCITAQNTQGVHGVYPLSVESVKAQILAIRDDFSIKAFKMGALCNAQIIECVANALETCDFGLCVLDPVMVAKNGALLLEEEAILSLKKRLLPKTNLLTPNLPEVYALTGVQARDDKSASKAMGVLRDLGVKNAVIKGGHTEHFQGEFSNDWVFLEDAEFILSAKRFNTKNTHGTGCTLSSLIVGLLAQGLDLKNAITKAKELLTIIIQNPLNIGHGHGPLNLWSIKKHV

SEQ ID NO: 9390 - protein, 213 aa, Helicobacter pylori
  misc_feature (B) LOCATION 1...213
  hypothetical: YES
VLEKQDKDLFLLQVGNRIIPTKSEQELKINQPYFATMQRNQLGDIVLKNLVPAPKILDALDDLPVIEMKKLKEILSAKDNTPLKEYKELLSEKLIHAKSSQEFLNTANMLLSLQSQVLSFVVENERKKAFLQMKAKKQSVDFYALYPNLGEIGGVIYLKEKEKQLFLKTTLQRTKEVLKEAQNTLLGFSFVEIVCEKTPMLFAFEDRLLDTLG

SEQ ID NO: 9391 - protein, 233 aa, Helicobacter pylori
  misc_feature (B) LOCATION 1...233
  hypothetical: YES
RPSFQKRCAHFNATLPILLKVLEKQDKDLFLLQVGNRIIPTKSEQELKINQPYFATMQRNQLGDIVLKNLVPAPKILDALDDLPVIEMKKLKEILSAKDNTPLKEYKELLSEKLIHAKSSQEFLNTANMLLSLQSQVLSFVVENERKKAFLQMKAKKQSVDFYALYPNLGEIGGVIYLKEKEKQLFLKTTLQRTKEVLKEAQNTLLGFSFVEIVCEKTPMLFAFEDRLLDTLG

SEQ ID NO: 9392 - protein, 83 aa, Helicobacter pylori
  misc_feature (B) LOCATION 1...83
  hypothetical: YES
SLLSLLFSLFMRFSIITILHFKALILGFVSVFSSALFCFCLAIFVARIFQNEQSILGFCNTINLYALMSCLASHQSFNGSKKG

SEQ ID NO: 9393 - protein, 174 aa, Helicobacter pylori
  misc_feature (B) LOCATION 1...174
  hypothetical: YES
CSNFTKDSCMRKFLDGAKSEVLKYDVISFDIFDTLLLRPFIKPTDLFLYIETKYNIKGFHQARILAEMQSRKLSKRQDITLDEIYHQIPKEFHSYKGVEIATEKEVLVPNLEMLELYRFAKENNKRVIIVSDMYLPLEVLEDILISKGFDGYTNFYLSNHIMLTKHSKDLFKHV

SEQ ID NO: 9394 - protein, 428 aa, Helicobacter pylori
  misc_feature (B) LOCATION 1...428
  hypothetical: YES
ACLKQENITNTQILHIGDNSWADDAMPKSLGIATLFRKSVLKQLEEVFPKYKTFNPTSVAQSFILGSLCVFYKNYIQKHEKFDYWFLLGAMQAGIAAVAYCQFIYKEIHKRNIDTLVFVARDGYLLQKIFNILYPNSYKTTYVYAPRILKKAVFLEVVEGESLEILRILEGEEEVKKKQITTNQQAYVYLYSNFEHCRHLALKCLDNYRKYLFSSNLEGNIAIVDTITLGYSSQGLIQKALNKEVFGCYVDLLRILNYDCVSFLPFSHPKPVYFHNWDFMEFLLTSPEYPILNVENGVPIYQKDVSSCEKHRSKAYEKIVEGAVGYASYFKESQISLDIHDVIEWVNFFIDNPSIQDQEQFRQIYFLPDATHKNALPLFCNDVSLLSCILKPSQSYSVLKRSLRTNKQERLFKILSLIKKIYGKLKKK

SEQ ID NO: 9395 - protein, 591 aa, Helicobacter pylori
  misc_feature (B) LOCATION 1...591
  hypothetical: YES
MRKFLDGAKSEVLKYDVISFDIFDTLLLRPFIKPTDLFLYIETKYNIKGFHQARILAEMQSRKLSKRQDITLDEIYHQIPKEFHSYKGVEIATEKEVLVPNLEMLELYRFAKENNKRVIIVSDMYLPLEVLEDILISKGFDGYTNFYLSNHIMLTKHSKDLFKHVLKQENITNTQILHIGDNSWADDAMPKSLGIATLFRKSVLKQLEEVFPKYKTFNPTSVAQSFILGSLCVFYKNYIQKHEKFDYWFLLGAMQAGIAAVAYCQFIYKEIHKRNIDTLVFVARDGYLLQKIFNILYPNSYKTTYVYAPRILKKAVFLEVVEGESLEILRILEGEEEVKKKQITTNQQAYVYLYSNFEHCRHLALKCLDNYRKYLFSSNLEGNIAIVDTITLGYSSQGLIQKALNKEVFGCYVDLLRILNYDCVSFLPFSHPKPVYFHNWDFMEFLLTSPEYPILNVENGVPIYQKDVSSCEKHRSKAYEKIVEGAVGYASYFKESQISLDIHDVIEWVNFFIDNPSIQDQEQFKQIYFLPDATHKNALPLFCNDVSLLSCILKPSQSYSVLKRSLRTNKQERLFKILSLIKKIYGKLKKK

SEQ ID NO: 9396 - protein, 253 aa, Helicobacter pylori
  misc_feature (B) LOCATION 1...253
  hypothetical: YES
LWHAAFSVGEWGWNGDEIPYRDCDEWGLDDFYGVKPTDCAGVLSFARSHRRQNQAVLSKPKSFRMKKIAFILALWVGLLGAFEPKKSHIYFGAMVGLAPVKITPKPASDSSYTAFLWGAKGGYQFAFFKALALRGEFSYLMAIKPTALHTINTSLLSLNMDVLSDFYTYKKYSFGVYGGLGIGYFYQSNHLGMKNSSFMGYNGLFNVGLGSTIDRHHRVELGAKIPFSKTRNSFKNSYFLESVFIHAAYSYMF

SEQ ID NO: 9397 - protein, 129 aa, Helicobacter pylori
  misc_feature (B) LOCATION 1...129
  hypothetical: YES
MNTIIRYASLWGLCITLTLAQTPSKTPDEIKQILNNYSHKNLKLIDXPTSSLXATPGFXPSPKETATTINQEIAKYHEKSDKAALGLYELLKGATTNLSLQAQELSVKQAMEEPHHRQSDVFAYFEREL

SEQ ID NO: 9398 - protein, 137 aa, Helicobacter pylori
  misc_feature (B) LOCATION 1...137
  hypothetical: YES
SALQKKLEQIQTDIKRVTKLYDKGLTTIDDLQSLKAQGNLSEYDILDMQFALEQNRLTLEYLTNLSVKNLKKTTIDAPNLQLRERQDLVSLREQISALRYQNKQLNYYPKIDVFDSWLFWIQKPAYATGRFGNFYPG

SEQ ID NO: 9399 - protein, 183 aa, Helicobacter pylori
  misc_feature (B) LOCATION 1...183
  hypothetical: YES
GGLMNTIIRYASLWGLCITLTLAQTPSKTPDEIKQILNNYSHKNLKLIDPPTSSLEATPGFLPSPKETATTINQEIAKYHEKSDKAALGLYELLKGATTNLSLQAQELSVKQAMKNHTIAKAMFLPTLNASYNFKNEARDTPEYKHYNTQQLQAQVTLNVFNGFSNVNNVKEKSATTDPLWLI

SEQ ID NO: 9400 - protein, 477 aa, Helicobacter pylori
  misc_feature (B) LOCATION 1...477
  hypothetical: YES
MNTIIRYASLWGLCITLTLAQTPSKTPDEIKQILNNYSHKNLKLIDPPTSSLEATPGFLPSPKETATTINQEIAKYHEKSDKAALGLYELLKGATTNLSLQAQELSVKQAMKNHTIAKAMFLPTLNASYNFKNEARDTPEYKHYNTQQLQAQVTLNVFNGFSNVNNVKEKSATYRSTVANLEYSRQSVYLQVVQQYYEYFNNLARMIALQKKLEQIQTDIKRVTKLYDKGLTTIDDLQSLKAQGNLSEYDILDMQFALEQNRLTLEYLTNLSVKNLKKTTIDAPNLQLRERQDLVSLREQISALRYQNKQLNYYPKIDVFDSWLFWIQKPAYATGRFGNFYPGQQNTAGVTATLNIFDDIGLSLQKQSIMLGQLANEKNLAYKKLEQEKDEQLYRKSLDIARAKIESSKASLDAANLSFANIKRKYDANLVDFTTYLRGLTTRFDAEVAYNLALNNYEVQKANYIFNSGHKIDDYVH

SEQ ID NO: 9401 - protein, 113 aa, Helicobacter pylori
  misc_feature (B) LOCATION 1...113
  hypothetical: YES
MAKMNAPDGVAVWVNEDRCKGCDICVSVCPAGVLGMGIEKERVLGKVAKVAYPESCIGCVQCELHCPDFAIYVADRKDFKFAKVSKEAQERSEKVKANKYMLLEETILEGRGK

SEQ ID NO: 9402 - protein, 113 aa, Helicobacter pylori; identical to SEQ ID NO: 9401
  misc_feature (B) LOCATION 1...113
  hypothetical: YES

SEQ ID NO: 9403 - protein, 204 aa, Helicobacter pylori
  misc_feature (B) LOCATION 1...204
  hypothetical: YES
MQAVILANGEFPKSKKCLDILQNAPFLIACDGAVISLHALQFKPSVVIGDLDSIDSHLKALYNPIRVSEQDSNDLSKAFFYALNRGCDDFIFLGLNGKREDHALANTFLLLEYFKFCKKIQSVSDYGLFRVLETPFTLPSFKGEQISLFSLDLKARFTSKNLKYPLKDLRLKTLFSGSLNEATNHCFSLSSEPKSVVLVYQKFS

SEQ ID NO: 9404 - protein, 209 aa, Helicobacter pylori
  misc_feature (B) LOCATION 1...209
  hypothetical: YES
PLEPIMQAVILANGEFPKSKKCLDILQNAPFLIACDGAVISLHALQFKPSVVIGDLDSIDSHLKALYNPIRVSEQDSNDLSKAFFYALNRGCDDFIFLGLNGKREDHALANTFLLLEYFKFCKKIQSVSDYGLFRVLETPFTLPSFKGEQISLFSLDLKARFTSKNLKYPLKDLRLKTLFSGSLNEATNHCFSLSSEPKSVVLVYQKFS

SEQ ID NO: 9405 - protein, 59 aa, Helicobacter pylori
  misc_feature (B) LOCATION 1...59
  hypothetical: YES
MTITTLSFLFTTPEVFVNQDFPWLSGAGRLVVKDLALFAGGLFVAGFDRNAIWRVKGFA

SEQ ID NO: 9406 - protein, 64 aa, Helicobacter pylori
  misc_feature (B) LOCATION 1...64
  hypothetical: YES
VFVNQHFPWLSGAGRLVVKDLALFAGGLFVAGFDAKRYLEGKGFCLMDRSSVGIKTKCSSGCCS

SEQ ID NO: 9407 - protein, 77 aa, Helicobacter pylori
  misc_feature (B) LOCATION 1...77
  hypothetical: YES
RSPPYSFLFTTPEVFVNQHFPWLSGAGRLVVKDLALFAGGLFVAGFDAKRYLEGKGFCLMDRSSVGIKTKCSSGCCS

SEQ ID NO: 9408 - protein, 104 aa, Helicobacter pylori
  misc_feature (B) LOCATION 1...104
  hypothetical: YES
MQALKSLLEVITKLQNLGGYLMHIAIFIIFIWIGGLKFVPYEAEGIAPFVXNSPFFSFMYKFEKPAYKQHKMSESQSMQEEMQDNPKIVENKXWHKENRTSFSG

SEQ ID NO: 9409 - protein, 141 aa, Helicobacter pylori
  misc_feature (B) LOCATION 1...141
  hypothetical: YES
RNKTMQALKSLLEVITKLQNLGGYLMHIAIFIIFIWIGGLKFVPYEAEGIAPFVANSPFFSFMYKFEKPAYKQHKMSESQSMQEEMQDNPKIVENKEWHKENRTYLVAEGLGITIMILGILVLLGLWMPLMGVVGGFLSLE

SEQ ID NO: 9410 - protein, 169 aa, Helicobacter pylori
  misc_feature (B) LOCATION 1...169
  hypothetical: YES
MQALKSLLEVITKLQNLGGYLMHIAIFIIFIWIGGLKFVPYEAEGIAPFVANSPFFSFMYKFEKPAYKQHKMSESQSMQEEMQDNPKIVENKEWHKENRTYLVAEGLGITIMILGILVLLGLWMPLMGVVGGLLVAGMTITTLFFFIHNARSVCQSAFPMAFWGWKASG

SEQ ID NO: 9411 - protein, 215 aa, Helicobacter pylori
  misc_feature (B) LOCATION 1...215
  hypothetical: YES
MQALKSLLEVITKLQNLGGYLMHIAIFIIFIWIGGLKFVPYEAEGIAPFVANSPFFSFMYKFEKPAYKQHKMSESQSMQEEMQDNPKIVENKEWHKENRTYLVAEGLGITIMILGILVLLGLWMPLMGVVGGLLVAGMTITTLSFLFTTPEVFVNQHFPWLSGAGRLVVKDLALFAGGLFVAGFDAKRYLEGKGFCLMDRSSVGIKTKCSSGCCS

SEQ ID NO: 9412 - protein, 58 aa, Helicobacter pylori
  misc_feature (B) LOCATION 1...58
  hypothetical: YES
ALQSKLYLQTRIGRGEVESVIFDKGKPMLRMGEMILPIDCAIEVTNRISAECSIYPLS

SEQ ID NO: 9413 - protein, 243 aa, Helicobacter pylori
  misc_feature (B) LOCATION 1...243
  hypothetical: YES
DIFNKEEIMAIDLAEVTGAKAAQERKKEQPTIANGLDKNAFMKLFLEQLKNQDPTAPMETDKIITQTAQLTQVEMQEENKKTMQEVASAMKSNKETNESLKDFQGALKDTMENLNKGMDDSLKANNALREVSALNSVSMIGKIAETDVSGANFDGNNKLSFSLFFDEKIDASKGVPAIQILNENNELVKTIPLKDYNGQKGYINFEWDGTNEKGEKVPKGNYKIKAEYNLGSPKQAVFANAHW

SEQ ID NO: 9414 - protein, 363 aa, Helicobacter pylori
  misc_feature (B) LOCATION 1...363
  hypothetical: YES
MAIDLAEVTGAKAAQERKKEQPTIANGLDKNAFMKLFLEQLKNQDPTAPMETDKIITQTAQLTQVEMQEENKKTMQEVASAMKSNKETNESLKDFQGALKDTMENLNKGMDDSLKANNALREVSALNSVSMIGKIAETDVSGANFDGNNKLSFSLFFDEKIDASKGVPAIQILNENNELVKTIPLKDYNGQKGYINFEWDGTNEKGEKVPKGNYKIKAEYNLDSQSKQYLQTRIGRGEVESVIFDKGKPMLRMGEMILPIDSAIEFYKPDQKPLDQKLSDQKPQKLSEQKALEQKISEQKPQEPLDQKLSDQKPQKPLEQKISEQKPLDQKLSDQKPQKPLEQKISEQKPLDQKPQTPPKETA

SEQ ID NO: 9415 - protein, 133 aa, Helicobacter pylori
  misc_feature (B) LOCATION 1...133
  hypothetical: YES
IPLDTIPQVIFFSKKGYEWQPFNHSTIQPFNHSTIQPFNHSIIQSFNHSIIQSFNHSTIQATLPYFYNYLSFYKNLFKNPLFFIIPPFINPFINPFINPFINPFINPFINPFINPFINPFINPFINPFINPFI

SEQ ID NO: 9416 - protein, 161 aa, Helicobacter pylori
  misc_feature (B) LOCATION 1...161
  hypothetical: YES
MFFKTYQKLLGASCLALYLVGCGNGGGGESPVEMIXNSEGTFQIDSKADSITIQGVKLNRGNCAVNFVPVSETFQMGVLSQVTPISIQDFKDMASTYKIFDQKKGLANIANKISQLEQKGVMMKPXTLNFGESLKGISQGCNIIEAEIQTDKGAWTFNFDK

SEQ ID NO: 9417 - protein, 161 aa, Helicobacter pylori
  misc_feature (B) LOCATION 1...161
  hypothetical: YES
MFFKTYQKLLGASCLALYLVGCGNGGGGESPVEMIANSEGTFQIDSKADSITIQGVKLNRGNCAVNFVPVSETFQMGVLSQVTPISIQDFKDMASTYKIFDQKKGLANIANKISQLEQKGVMMEPQTLNFGESLKGISQGCNIIEAEIQTDKGAWTFNFDK

SEQ ID NO: 9418 - protein, 173 aa, Helicobacter pylori
  misc_feature (B) LOCATION 1...173
  hypothetical: YES
RAITTNQFVGTNMFFKTYQKLLGASCLALYLVGCGNGGGGESPVEMIANSEGTFQIDSKADSITIQGVKLNRGNCAVNFVPVSETFQMGVLSQVTPISIQDFKDMASTYKIFDQKKGLANIANKISQLEQKGVMMEPQTLNFGESLKGISQGCNIIEAEIQTDKGAWTFNFDK

SEQ ID NO: 9419 - protein, 85 aa, Helicobacter pylori
  misc_feature (B) LOCATION 1...85
  hypothetical: YES
FTLDELSQLLKPSFRAKQLNLWLNAKNKPSFRDIQNNFSQDFIAYLEQEFTLRAIEIAHVRESVDGSKKYLFKSLRDNHTFEAVL

SEQ ID NO: 9420 - protein, 268 aa, Helicobacter pylori
  misc_feature (B) LOCATION 1...268
  hypothetical: YES
SGVVKMKDKKIDEETNAVLEGEKYTVCVSCQIGCQVGCSFCFTQKGGFVRDLKASEIIQQALLIKEANNLPIEKALNIVFMGMGEPLNNLDEVCKAVEIFNTGMQISPKRVTISTSGVADKIPILAGKNLGVQLAISLHAVDDKTRSSLMPLNKKYNIECVLNEVRKWPLEQRKRVMFEYLLIKDLNDSLDCAKKLLKLLNGIKSKVNLILFNPHEGSKFERPSLESARMFANFLNAKGLLCTIRESKALDIEAACGQLREKKLQQKI

SEQ ID NO: 9421 - protein, 357 aa, Helicobacter pylori
  misc_feature (B) LOCATION 1...357
  hypothetical: YES
MKASIYDFTLDELSQLLKPSFRAKQLYLWLYAKYKTSFKDMQNNFSKDFIAYLEQEFTLRTIEIAHVRESVDGSKKYLFKSLRDNHTFEAVLLKMKDKKIDEETNAVLEGEKYTVCVSCQIGCQVGCSFCFTQKGGFVRDLKASEIIQQALLIKEANNLPIEKALNIVFMGMGEPLNNLDEVCKAVEIFNTGMQISPKRITISTSGVADKIPILAGKNLGVQLAISLHAVDDKTRSSLMPLNKKYNIECVLNEVRKWPLEQRKRVMFEYLLIKDLNDSLDCAKKLLKLLNGIKSKVNLILFNPHEGSKFERPSLESARMFADFLNAKGLLCTIRESKALDIEAACGQLREKKLQQKI

SEQ ID NO: 9422 - protein, 280 aa, Helicobacter pylori
  misc_feature (B) LOCATION 1...280
  hypothetical: YES
VFDSLGGFLGYKTFKPIVDKVKNINAWIKNYDNKKAQEIMGFIENPTPDFQNNKFLCVLNRQGTRHNNYLGLTSTNLLIGAIYFSIRHCIKATWQNDRDQFYAPYDDAFQDDSEFKNNCLAFMLFHTQNRITATQGTNHFIPFSEDEVDSKERYLSHALLDFLKGEIKEPKKSDSLFLNAKKENKPLKFSSSASKVFDAGREIYRYYHTQDFIHTPYNANASLYDIKEFFQGRNKQGRLNSPTKAKDEYYKQLYANLQYALKDLAKEIQPKVYEYGFLRE

SEQ ID NO: 9423 - protein, 299 aa, Helicobacter pylori
  misc_feature (B) LOCATION 1...299
  hypothetical: YES
SGIPLPPPPLKPTNAFNLEVFDSLGGFLGYKTFKPIVDKVKNINAWIKNYDNKKAQEIMGFIENPTPDFQNNKFLCVLNRQGTRHNNYLGLTSTNLLIGAIYFSIRHCIKATWQNDRDQFYAPYDDAFQDDSEFKNNCLAFMLFHTQNRITATQGTNHFIPFSEDEVDSKERYLSHALLDFLKGEIKEPKKSDSLFLNAKKENKPLKFSSSASKVFDAGREIYRYYHTQDFIHTPYNANASLYDIKEFFQGRNKQGRLNSPTKAKDEYYKQLYANLQYALKDLAKEIQPKVYEYGFLRE

SEQ ID NO: 9424 - protein, 309 aa, Helicobacter pylori
  misc_feature (B) LOCATION 1...309
  hypothetical: YES
CDRAIPHWLFSLGYRYPPPLKPTNAFNLEVFDSLGGFLGYKTFKPIVDKVKNINAWIKNYDNKKAQEIMGFIENPTPDFQNNKFLCVLNRQGTRHNNYLGLTSTNLLIGAIYFSIRHCIKATWQNDRDQFYAPYDDAFQDDSEFKNNCLAFMLFHTQNRITATQGTNHFIPFSEDEVDSKERYLSHALLDFLKGEIKEPKKSDSLFLNAKKENKPLKFSSSASKVFDAGREIYRYYHTQDFIHTPYNANASLYDIKEFFQGRNKQGRLNSPTKAKDEYYKQLYANLQYALKDLAKEIQPKVYEYGFLRE

SEQ ID NO: 9425 - protein, 187 aa, Helicobacter pylori
  misc_feature (B) LOCATION 1...187
  hypothetical: YES
LETYIIDADNIDGDLFFYNLTRNSNDFSMLPVFELDRIAQKIRNILKKHGSRKDIILKHNEIKEAFFSPFKPQLKTVQVFLSHSHADKNKALGVKDYLESKTKRKVFIDSLFWDYKDDVLNKLAKHDDISKIEDAFTLILRKSLQDMIEKCPYFVFLQSKNSVSNQGLSRITYSAWIYEELKIASFY

SEQ ID NO: 9426 - protein, 198 aa, Helicobacter pylori
  misc_feature (B) LOCATION 1...198
  hypothetical: YES
LETYIIDADNIDGDLFFYNLTRNSNDFSMLPVFELDRIAQKIRNILKKHGSRKDIILKHNEIKEAFFSPFKPQLKTVQVFLSHSHADKNKALGVKDYLESKTKRKVFIDSLFWDYKDDVLNKLAKHDDISKIEDAFTLILRKSLQDMIEKCPYFVFLQSKNSVSNQGLSRITYSAWIYEELKIASFLLALLTRVAQFQ

SEQ ID NO: 9427 - protein, 212 aa, Helicobacter pylori
  misc_feature (B) LOCATION 1...212
  hypothetical: YES
SKDFKGNLNKRQKYLETYIIDADNIDGDLFFYNLTRNSNDFSMLPVFELDRIAQKIRNILKKHGSRKDIILKHNEIKEAFFSPFKPQLKTVQVFLSHSHADKNKALGVKDYLESKTKRKVFIDSLFWDYKDDVLNKLAKHDDISKIEDAFTLILRKSLQDMIEKCPYFVFLQSKNSVSNQGLSRITYSAWIYEELKIASFLLALLTRVAQFQ

SEQ ID NO: 9428 - protein, 86 aa, Helicobacter pylori
  misc_feature (B) LOCATION 1...86
  hypothetical: YES
MACKFCPKIRKTDWIFILIAALGFYSVNKLGYAPKFNTPTPKSSRPLSRPIEKPNNMTEEERKKRFIELQKACLLHKDKKACEEVF

SEQ ID NO: 9429 - protein, 86 aa, Helicobacter pylori; identical to SEQ ID NO: 9428
  misc_feature (B) LOCATION 1...86
  hypothetical: YES

SEQ ID NO: 9430 - protein, 87 aa, Helicobacter pylori
  misc_feature (B) LOCATION 1...87
  hypothetical: YES
IMACKFCPKIRKTDWIFILIAALGFYSVNKLGYAPKFNTPTPKSSRPLSRPIEKPNNMTEEERKKRFIELQKACLLHKDKKACEEVF

SEQ ID NO: 9431 - protein, 189 aa, Helicobacter pylori
  misc_feature (B) LOCATION 1...189
  hypothetical: YES
MMTKNAYAFVVIEKSIMVFKCAKDKGLIPITEGFVPLKEGFLRSFKERCNLDFLENLDLLFLYDYQFPSEVFSLCKDLKNSIWDRKLVVVLVEALEGFKGLNLSLKIEDRHSNSLGNGVQKLLTNADLGSNHKPIVIDSMKTYHQSQQEKYKRERGETLEVRPTTPPSYGGGSIRISGDKKPDSNEENF

SEQ ID NO: 9432 - protein, 77 aa, Helicobacter pylori
  misc_feature (B) LOCATION 1...77
  hypothetical: YES
MRSSCPKGFTSYAKDNDLGFDATELEQIAKGFIPRGYLWHFDANVLGNLALVREELLLGVKHTKGYSLWTEFLQKQN

SEQ ID NO: 9433 - protein, 79 aa, Helicobacter pylori
  misc_feature (B) LOCATION 1...79
  hypothetical: YES
NRMRSSCPKGFTSYAKDNDLGFDATELEQIAKGFIPRGYLWHFDANVLGNLALVREELLLGVKHTKGYSLWTEFLQKQN

SEQ ID NO: 9434 - protein, 82 aa, Helicobacter pylori
  misc_feature (B) LOCATION 1...82
  hypothetical: YES
MKKTRIRKKSALMNGCWAEFDSVFSAIVPLEDLNKTACAHHALKALQATLKTTIWALMRQSWNRSQKDSSLGGICGILTRMF

SEQ ID NO: 9435 - protein, 105 aa, Helicobacter pylori
  misc_feature (B) LOCATION 1...105
  hypothetical: YES
WTLAKIRCVKNFKEAIEGFTEKIKESPNDSNAINEAFDNLETELERATENLSQKIDPVLERNENYTQKALEYREFLESRKESFIVDEKNPYPEEVSFNEWLLGGI

SEQ ID NO: 9436 - protein, 104 aa, Helicobacter pylori
  misc_feature (B) LOCATION 1...104
  hypothetical: YES
TLAKIRCVKNFKEAIEGFTEKIKESPNDSNAINEAFDNLETELERATENLSQKIDPVLERNENYTQKALEYREFLESRKESFIVDEKNPYPEEVSFNEWLLGGI

SEQ ID NO: 9437 - protein, 108 aa, Helicobacter pylori
  misc_feature (B) LOCATION 1...108
  hypothetical: YES
ITNTTFQLQGVLLEYDFERPAISYTPKKSVFNERLKDLRENFSASLYADLKDKIHHNALSNDDLERMIAFREQEFEKSLEDWMGAYSYDATLRCFSSERIYLDRLGWE

SEQ ID NO: 9438 - protein, 468 aa, Helicobacter pylori
  misc_feature (B) LOCATION 1...468
  hypothetical: YES
MAEWKTDTEEVKKVVGRCREFKRSLQEEKCSPFIKDLDSYALKIIVERRKTEMQLEKAIGELKKAKSNEDDAKVALRVLQGASVVSWIWPPARIAATAAIVAAEAVLKFMKEDTEKCKRNVELLERMLEIYSNQAKASANLMNQAWEGIKKRLHFYTDKHQEFIRRLKQASDAIDNEYNFPTPGVLLEYDFERPAISYTPKKSVFNERLKDLRENFSASLYADLKDKIHHNALSNDDLERMIAFREQEFEKSLEDWMGAYSYDENPNDELDRMAISKEQELEKSLEDLMPSVLGVPSYNESLTLAKNRCVKNFKEALEGFTEKIKESPNDSNAINEAFDNLETELERATENLSQKIDPVLERNENYTQKALEYREFLESRKESFIVDEKNPYPEEVSFNEWRWAEFDSVFSAIVPLEDLNKTACAHHALKALQATLKTTIWALMRQSWNRSQKDSSLGGICGILTRMF

SEQ ID NO: 9439 - protein, 500 aa, Helicobacter pylori
  misc_feature (B) LOCATION 1...500
  hypothetical: YES
MAEWKTDTEEVKKVVGRCREFKRSLQEEKCSPFIKDLDSYALKIIVERRKTEMQLEKAIGELKKAKSNEDDAKVALRVLQGASVVSWIWPPARIAATAAIVAAEAVLKFMKEDTEKCKRNVELLERMLEIYSNQAKASANLMNQAWEGIKKRLHFYTDKHQEFIRRLKQASDAIDNEYNFPTPGVLLEYDFERPAISYTPKKSVFNERLKDLRENFSASLYADLKDKIHHNALSNDDLERMIAFREQEFEKSLEDWMGAYSYDENPNDELDRMAISKEQELEKSLEDLMPSVLGVPSYNESLTLAKNRCVKNFKEALEGFTEKIKESPNDSNAINEAFDNLETELERATENLSQKIDPVLERNENYTQKALEYREFLESRKESFIVDEKNPYPEEVSFNEWRWAEFDSVFSAIVPLEDLNKTACAHHALKALQATLKDNDLGFDATELEQIAKGFIPRGYLWHFDANVLGNLALVREELLLGVKHTKGYSLWTEFLQKQN

SEQ ID NO: 9440 - protein, 268 aa, Helicobacter pylori
  misc_feature (B) LOCATION 1...268
  hypothetical: YES
MKQSLREQKLLKILENDVLTILDSFSNYLFELREELDFIEEEMEGEITEQNLTALYDFSNFLEDHVNVFYENVLNIDDVKTEHLYSGLIDSLNANLHFVKSFLSNQDLDFRFFKEINDGQDPQKTLSRLIPLQSGKNDASSFKANNSFVSLVYVYAYFMLETIRQSYRILRLLEKPINNNISEDMQSDIENFFVQANFLEYYVQNKIYPTNHAYDFTHLIMDSIIPNWIQIDMSVEAKKKELFEKYFQNIDEVTNKMLDQENQNKNSD

SEQ ID NO: 9441 - protein, 272 aa, Helicobacter pylori
  misc_feature (B) LOCATION 1...272
  hypothetical: YES
RSIKMKQSLREQKLLKILENDVLTILDSFSNYLFELREELDFIEEEMEGEITEQNLTALYDFSNFLEDHVNVFYENVLNIDDVKTEHLYSGLIDSLNANLHFVKSFLSNQDLDFRFFKEINDGQDPQKTLSRLIPLQSGKNDASSFKANNSFVSLVYVYAYFMLETIRQSYRILRLLEKPINNNISEDMQSDIENFFVQANFLEYYVQNKIYPTNHAYDFTHLIMDSIIPNWIQIDMSVEAKKKELFEKYFQNIDEVTNKMLAQENQNKNSD

SEQ ID NO: 9442 - protein, 113 aa, Helicobacter pylori
  misc_feature (B) LOCATION 1...113
  hypothetical: YES
KRLNALARQLKGELKIFIEEARNNLLKLLASSEVLIDYSEEDIPSDFLKEVSFNLEKQIASFKDLLDFSNAQKQRNKGHALSIVGKPNAGKSSLLRHFSEERVGERVRARREP

SEQ ID NO: 9443 - protein, 149 aa, Helicobacter pylori
  misc_feature (B) LOCATION 1...149
  hypothetical: YES
TMKNTSSSTTLTMNDTIAAIATPLGKGAISIIKISGHNALNILKQLTQKQDFTPRYAYVCDIFSDGVLLDKALVIYFKAPYSFTGEDVCEIQCHGSPLLAQNILQACLNLGARLAKAGEFSKKAFLNHKMDLSEIEASVQLILCEDESV

SEQ ID NO: 9444 - protein, 153 aa, Helicobacter pylori
  misc_feature (B) LOCATION 1...153
  hypothetical: YES
LGIEKSLKSLENCDIILGVFDLSKPLEKEDFNLMDTLNRTKKPCIVVLNKNDLAPKLELEILKSYLKIPYSILETNTLNSKACLKDLSQKISEFFPKLDTQNKLLLTSLAQTTALENAITELQNAKSHLDTLEAFFLSYFKCDRKLELAHPPL

SEQ ID NO: 9445 - protein, 152 aa, Helicobacter pylori
  misc_feature (B) LOCATION 1...152
  hypothetical: YES
GIEKSLKSLENCDIILGVFDLSKPLEKEDFNLMDTLNRTKKPCIVVLNKNDLAPKLELEILKSYLKIPYSILETNTLNSKACLKDLSQKISEFFPKLDTQNKLLLTSLAQTTALENAITELQNAKSHLDTLEAFFLSYFKCDRKLELAHPPL

SEQ ID NO: 9446 - protein, 450 aa, Helicobacter pylori
  misc_feature (B) LOCATION 1...450
  hypothetical: YES
MNDTIAAIATPLGKGAISIIKISGHNALNILKQLTQKQDFTPRYAYVCDIFSDGVLLDKALVIYFKAPYSFTGEDVCEIQCHGSPLLAQNILQACLNLGARLAKAGEFSKKAFLNHKMDLSEIEASVQLILCEDESVLNALARQLKGELKIFIEEARNNLLKLLASSEVLIDYSEEDIPSDFLKEVSFNLEKQIASFKDLLDFSNAQKQRNKGHALSIVGKPNAGKSSLLNAMLLEERALVSDIKGTTRDTIEEVIELKGHKVRLIDTAGIRESADEIERLGIEKSLKSLENCDIILGVFDLSKPLEKEDFNLMDTLNRTKKPCIVVLNKNDLAPKLELEILKSYLKIPYSILETNTLNSKACLKDLSQKISEFFPKLDTQNKLLLTSLAQTTALENAITELQNAKSHLDTLELFSYHILSAIENLNLLTRPYETSQMLDSMFSEFCLGK

SEQ ID NO: 9447 - protein, 312 aa, Helicobacter pylori
  misc_feature (B) LOCATION 1...312
  hypothetical: YES
MKSDKPFLERYFYDPTLLQKGLIFALYPFSLIYQCIATIKRKTAKKHDFKIPIISIGNLIAGGSGKTPFILEIAPRYQEVAVVSRGYQRDSKGLVVVSVKGNILVPQKTAGDEAYLLALNLKQASVIVSEKRELGVLKALELGSKIVFLDDGFRFNFNQFNALLKPKVPPYYPFCLPSGLYRENIKSYKEAHLVITEDKDYQRITSITNPTKRMLLVTAIANPSRLDAFLPKEVVKKLYFRDHAPFDLKLLEKEFYQNNATSLLVTSKDLVKLQDCKLPLSVLDLKLEICPKVLEEIDRYILSYPCNIKEHL

SEQ ID NO: 9448 - protein, 312 aa, Helicobacter pylori; identical to SEQ ID NO: 9447
  misc_feature (B) LOCATION 1...312
  hypothetical: YES

SEQ ID NO: 9449 - protein, 312 aa, Helicobacter pylori; identical to SEQ ID NO: 9447
  misc_feature (B) LOCATION 1...312
  hypothetical: YES

SEQ ID NO: 9450 - protein, 312 aa, Helicobacter pylori; identical to SEQ ID NO: 9447
  misc_feature (B) LOCATION 1...312
  hypothetical: YES

SEQ ID NO: 9451 - protein, 539 aa, Helicobacter pylori
  misc_feature (B) LOCATION 1...539
  hypothetical: YES
LMDRAKFIFVTGGVLSSLGKGISSSSIATLLQHCNYQVSILKIDPYINIDPGTMSPLEHGEVFVTSDGAETDLDIGHYERFLNRNLTRLNNFTTGQIFSSVIENERKGEYLGKTIQIVPHVTDEIKRRIKSAAKGLDFLIVEVGGTVGDMEGMFYVEPIRQLKLELRNKALINMHVTLMPYIRATSELRSRPTQHSVQELRRLGVTPQIILARSPKPLDKELKKKIALSCDVEQDSVIVATDTKSIYACPILFLQEGILTPIARRFNLNKLHPKMAAWNTLVEKIIAPKHKVKIGFVGKYLSLKESYKSLIEALIHAGAHLDTQVNIEWLDSENFNEKTDLEGVDAILVPGGFGERGIEGKICAIQRARLEKLPFLGICLGMQLAIVEFCRNVLGLKGANSTEFNQRCEYPVVYLIEDFMDQNHQKQVRTYNSPLGGTMRLGEYECEIMPNSLLEKAYKKPNIKERHRHRYEINPKYRQEWENKGLKVVGFGANHLIEAIELEDHPFFVGVQFHPEFTSRLQSPNPIILDFIKSALHKS

SEQ ID NO: 9452 - protein, 237 aa, Helicobacter pylori
  misc_feature (B) LOCATION 1...237
  hypothetical: YES
VLNEEQNSLEEKGGENKNEKETPLKGIHSKIPSLKQALEQTISKIKSSKEFFKQLLHNKKKLYIALGILLSLIALIVALSLLLGHKKENKQTSLQTNTATTNNETPNDTNNAEAEGQIENLDLPDLIGKDSLKRNDESQVDAMMQKASLLYEQGQKDEALHLFDKIASFSQGIASHNLGVIKFKEKDFNGALDLFDSSIASKENASVSAIDALVTAYHLQDADLYYHYLKIVKRHFV

SEQ ID NO: 9453 - protein, 841 aa, Helicobacter pylori
  misc_feature (B) LOCATION 1...841
  hypothetical: YES
VLNEEQNSLEEKGGENKNEKETPLKGIHSKIPSLKQALEQTISKIKSSKEFFKQLLHNKKKLYIALGILLSLIALIVALSLLLGHKKENKQTSLQTNTATTNNETPNDTNNAEAEGQIENLDLPDLIGKDSLKRNDESQVDAMMQKASLLYEQGQKDEALHLFDKIASFSQGIASHNLGVIKFKEKDFNGALDLFDSSIASKENASVSAIDALVTAYHLQDADLYYHYLKIVRDTLYKDYKKSFYSYAYALKSYYAGEYFEALSPLMHPNSNAFLKPNARLASKLFLMFKDETNAYKQLQKSANAQDELALGLLQARLGHYKQALEHLQHYLHNYPKDLNALMALELVSLKMGDTLKASEALKLASHTQEDTLLANSFYPIKPTINPMFLDKERAKERFWNTQYFEGKRDFIYRLLFYYAPFKVLDSKETLGVIEEGLFLLDSDTQKDLEGASLAFKRGRLMAIADKNALKGLKELEKKRLKKALSFFDLSLKNSPNNALLHYNVGLIYAQLENYHKAYFHFLRAFHLNSADYLSAVFAVLASHFTHEDTTEFLREITENFYSHDFSSPTQKALLSSLIAYLNYRTNWDMDWLKNAPKKLPFYYALEAVFAKESKDKKLMVQSFGNLKKMLPKDLISNIFYEIVSYYDASIRHTLSIYTLLDSHKISWDQTMQGPILGRHFYTYMGFMVNDLDHQERLLEQKIASLEEGEAPNDWLENLALVSLFQGQYEKASALYQNLIDGLKDNEARLKILAGLTYIAQNNYNNAALWLELGKLDDPNNENIRYALGLLYQRKGDLKSALNHFLAIKTSDFSSPYFDFEIDTNLLKERLNQEEKGEFLE

SEQ ID NO: 9454 - protein, 842 aa, Helicobacter pylori
  misc_feature (B) LOCATION 1...842
  hypothetical: YES
FVLNEEQNSLEEKGGENKNEKETPLKGIHSKIPSLKQALEQTISKIKSSKEFFKQLLHNKKKLYIALGILLSLIALIVALSLLLGHKKENKQTSLQTNTATTNNETPNDTNNAEAEGQIENLDLPDLIGKDSLKRNDESQVDAMMQKASLLYEQGQKDEALHLFDKIASFSQGIASHNLGVIKFKEKDFNGALDLFDSSIASKENASVSAIDALVTAYHLQDADLYYHYLKIVRDTLYKDYKKSFYSYAYALKSYYAGEYFEALSPLMHPNSNAFLKPNARLASKLFLMFKDETNAYKQLQKSANAQDELALGLLQARLGTYKQALEHLQHYLHNYPKDLNALMALELVSLKMGDTLKASEALKLASHTQEDTLLANSFYPIKPTINPMFLDKERAKERFWNTQYFEGKRDFIYRLLFYYAPFKVLDSKETLGVIEEGLFLLDSDTQKDLEGASLAFKRGRLMAIADKNALKGLKELEKKRLKKALSFFDLSLKNSPNNALLHYNVGLIYAQLENYHKAYFHFLRAFHLNSADYLSAVFAVLASHFTHEDTTEFLREITENFYSHDFSSPTQKALLSSLIAYLNYRTNWDMDWLKNAPKKLPFYYALEAVFAKESKDKKLMVQSFGNLKKMLPKDLISNIFYEIVSYYDASIRHTLSIYTLLDSHKISWDQTMQGPILGRHFYTYMGFMVNDLDHQERLLEQKIASLERGEAPNDWLENLALVSLFQGQYEKASALYQNLIDGLKDNEARLKILAGLTYIAQNNYNNAALWLELGKLDDPNNENIRYALGLLYQRKGDLKSALNHFLAIKTSDFSSPYFDFEIDTNLLKERLNQEEKGEFLE

SEQ ID NO: 9455 - protein, 258 aa, Helicobacter pylori
  misc_feature (B) LOCATION 1...258
  hypothetical: YES
LLSNKTLPKRFATYSLQEVGVIFLTTQILSIMRKTRCSKTLFFITRGRESFRYQLCDHYKQKRHQFDEDFRSLLKALKIALVEKYPLKKGAKIQGEHCFEYEADDIISFYKKKDPNNYVIASMDKDILYSNRGSHFNLKTNAFFNVSQKEAHFFAYYQCVVGDKGDNIKGVKGIGGFNYKDFLNEDAKEHELWEQIIQAFKIKEDLSDSEAKEKALLNMRLVNMHQMTHHGVIKLWEPEFKKAFFPKKPQRPDFKRIS

SEQ ID NO: 9456 - protein, 291 aa, Helicobacter pylori
  misc_feature (B) LOCATION 1...291
  hypothetical: YES
GLTIRQAFNKTRSTHSRTLLLDIDCVIPNIVRRLLSNKTLPKRFATYSLQEVGVIFLTTQILSIMRKTRCSKTLFFITRGRESFRYQLCDHYKQKRHQFDEDFRSLLKALKIALVEKYPLKKGAKIQGEHCFEYEADDIISFYKKKDPNNYVIASMDKDILYSNRGSHFNLKTNAFFNVSQKEAHFFAYYQCVVGDKGDNIKGVKGIGGFNYKDFLNEDAKEHELWEQIIQAFKIKEDLSDSEAKEKALLNMRLVNMHQMTHHGVIKLWEPEFKKAFFPKKPQRPDFKRIS

SEQ ID NO: 9457 - protein, 96 aa, Helicobacter pylori
  misc_feature (B) LOCATION 1...96
  hypothetical: YES
MAMLYCMRLLMPILGAIKGGDIGEWFPDNDPKYKNASSKELLKIVLDFSQSIGFELLEMGATIFSEIPKITPYKPAILENLSQLLGLEKSQISLKA

SEQ ID NO: 9458 - protein, 352 aa, Helicobacter pylori
  misc_feature (B) LOCATION 1...352
  hypothetical: YES
KAVATPHHTPLWLSVYESFKEALDFKEVILVVSELDYVYIQRHYPKIKLVKGGASRQESVRNALKVIDSTYTITSDVARGLANMEALKSLFLTLQQTSHYCIAPYLPCYDTAIYYNEALDREAIKLIQTPQLSHTKTLQSALNQGGFKDESSAILQAFPNSVSYIEGSKDLHKLTTSGDLKFFTPFFNPAKDTFIGMGFDTHAFIKDKPMVLGGVVLDCEFGLKAHSDGDALLHAVIDAILGAIKGGDIGEWFPDNDPKYKNASSKELLKIVLDFSQSIGFELLEMGATIFSEIPKITPYKPAILENLSQLLGLEKSQISLKVTTMEKMGFIGKQEGLLVQAHVSMRYKQKL

SEQ ID NO: 9459 - protein, 409 aa, Helicobacter pylori
  misc_feature (B) LOCATION 1...409
  hypothetical: YES
MSLIRVNGEAFKLSLESLEEDPFETKETLETLETLIKQTSVVLLAAGESKRFSRAIKKQWLRSHHTPLWLSVYESFKEALDFKEVILVVSELDYVYIQRHYPKIKLVKGGASRQESVRNALKVIDSTYTITSDVARGLANMEALKSLFLTLQQTSHYCIAPYLPCYDTAIYYNEALDREAIKLIQTPQLSHTKTLQSALNQGGFKDESSAILQAFPNSVSYIEGSKDLHKLTTSGDLKFFTPFFNPAKDTFIGMGFDTHAFIKDKPMVLGGVVLDCEFGLKAHSDGDALLHAVIDAILGAIKGGDIGEWFPDNDPKYKNASSKELLKIVLDFSQSIGFELLEMGATIFSEIPKITPYKPAILENLSQLLGLEKSQISLKATTMEKMGFIGKQEGLLVQAHVSMRYKQKL

SEQ ID NO: 9460 - protein, 242 aa, Helicobacter pylori
  misc_feature (B) LOCATION 1...242
  hypothetical: YES
LKVNFFATCLGAAIYSNASLNAIKLLRKENLEVVFKKDQTCCGQPSYNSGYYEETKKVVLYNIKLYSNNDYPIILPSGSCTGMMRHDYLELFEGHAEFNMVKDFCSRVYELSEFLDKKLQVKYEDKGEPLKITWHSNCHALRVAKVIDSAKNLIRQLKNVELIELEKEEECCGFGGTFSVKEPEISAVMVKEKIKDIESRHVDVIVSADAGCLMNISTAMQKMGSLTKPMHFYDFLASRLGL

SEQ ID NO: 9461 - protein, 256 aa, Helicobacter pylori
  misc_feature (B) LOCATION 1...256
  hypothetical: YES
LCLKLLIWNFKEHSLKVNFFATCLGAAIYSNASLNAIKLLRKENLEVVFKKDQTCCGQPSYNSGYYEETKKVVLYNIKLYSNNDYPIILPSGSCTGMMRHDYLELFEGHAEFNMVKDFCSRVYELSEFLDKKLQVKYEDKGEPLKITWHSNCHALRVAKVIDSAKNLIRQLKNVELIELEKEEECCGFGGTFSVKEPEISAVMVKEKIKDIESRHVDVIVSADAGCLMNISTAMQKMGSLTKPMHFYDFLASRLGL

SEQ ID NO: 9462 - protein, 256 aa, Helicobacter pylori; identical to SEQ ID NO: 9461
  misc_feature (B) LOCATION 1...256
  hypothetical: YES

SEQ ID NO: 9463 - protein, 281 aa, Helicobacter pylori
  misc_feature (B) LOCATION 1...281
  hypothetical: YES
REHQGGSLRKNNKSLVFIACQKDKLNDNEAPYYDVGVIGSVMREANMPNGRVKLLFNGIAKGRILEPAKENEQGFLEAQISPIEYLEYDKENIQAIVEVLKEKVITLANVSSLFPPDLIKALEDNDDPNRIADLIAAALHLKKDQAYFLFANNNTEQRLLDLIDIVIEETKTQKLQKEIKSKVHQKMEQTNKEYFLKEQLKQIQKELGTDKQRDEDLNQYYQKLESIKPFLKEEAFKEIKKQIDRLSRTHADSSDSATLQNYVETMLDVPFGQIEKKAHDI

SEQ ID NO: 9464 - protein, 282 aa, Helicobacter pylori
  misc_feature (B) LOCATION 1...282
  hypothetical: YES
REHQGGSLRKNNKSLVFIACQKDKLNDNEAPYYDVGVIGSVMREANMPNGRVKLLFNGIAKGRILEPAKENEQGFLEAQISPIEYLEYDKENIQAIVEVLKEKVITLANVSSLFPPDLIKALEDNDDPNRIADLIAAALHLKKDQAYFLFANNNTEQRLLDLIDIVIEETKTQKLQKEIKSKVHQKMEQTNKEYFLKEQLKQIQKELGTDKQRDEDLNQYYQKLESIKPFLKEEAFKEIKKQIDRLSRTHADSSDSATLQNYVETMLDVPFGQIEKKAHDIK

SEQ ID NO: 9465 - protein, 430 aa, Helicobacter pylori
  misc_feature (B) LOCATION 1...430
  hypothetical: YES
LRGHRRTYIGSMPGRIVQGLIEAKKMNPVMVLDEIDKVDRSVRGDPASALLEILDPEQNIAFRDHYANFSIDLSQVIFIATANNIDRIPAPLRDRMEFISVSSYTPSEKEEIAKNYLIPQELEKHALKPSEVDISHECLKLIIEKYTREAGVRDLRRQIATIMRKAALKYLEDNPHKKGRTKKSEDKDKKGGNEENEKRGESKDFCVSITPDNLKEYLERMVFEIDPIDEENKIGIVNGLAWTPVGGDVLKIEAVKIRGKGELKLTGSLGDVMKESAIIAFSVVKVLLDNETLKVPKIPSETDAENKKKKKVLKVYNAYDLHLHVPEGATPKDGPSAGIAMASVMASILCDRAIRSEVAMTGELTLSGEVLPIGGLKEKLIAAFKAGIKTALIPVKNYERDLDEIPTEVRENLNIVAVKNIAEVLEKTLL

SEQ ID NO: 9466 - protein, 831 aa, Helicobacter pylori
  misc_feature (B) LOCATION 1...831
  hypothetical: YES
MTEDFPKILPLLVEEDTFLYPFMIAPIFLQNNASIKAVAYAKNNKSLVFIACQKDKLNDNEAPYYDVGVIGSVMREANMPNGRVKLLFNGIAKGRILEPAKENEQGFLEAQISPIEYLEYDKENIQAIVEVLKEKVITLANVSSLFPPDLIKALEDNDDPNRIADLIAAALHLKKDQAYFLFANNNTEQRLLDLIDIVIEETKTQKLQKEIKSKVHQKMEQTNKEYFLKEQLKQIQKELGTDKQRDEDLNQYYQKLESIKPFLKEEAFKEIKKQIDRLSRTHADSSDSATLQNYVETMLDVPFGQYEKKALDIKHVKEQLDNDHYSLKRPKERIVEYFATMQLLEMRHKKKPEKKDKTKGTILCFYGPPGVGKTSLANSIAKAIERPLVRIALGGLEDVNELRGHRRTYIGSMPGRIVQGLIEAKKMNPVMVLDEIDKVDRSVRGDPASALLEILDPEQNIAFRDHYANFSIDLSQVIFIATANNIDRIPAPLRDRMEFISVSSYTPSEKEEIAKNYLIPQELEKHALKPSEVDISHECLKLIIEKYTREAGVRDLRRQIATIMRKAALKYLEDNPHKKGRTKKSEDKDKKGGNEENEKRGESKDFCVSITPDNLKEYLERMVFEIDPIDEENKIGIVNGLAWTPVGGDVLKIEAVKIRGKGELKLTGSLGDVMKESAIIAFSVVKVLLDNETLKVPKIPSETDAENKKKKKVLKVYNAYDLHLHVPEGATPKDGPSAGIAMASVMASILCDRAIRSEVAMTGELTLSGEVLPIGGLKEKLIAAFKAGIKTALIPVKNYERDLDEIPTEVRENLNIVAVKNIAEVLEKTLL

SEQ ID NO: 9467 - protein, 424 aa, Helicobacter pylori
  misc_feature (B) LOCATION 1...424
  hypothetical: YES
RKNMKKRLNIGLVGLGCVGSTVAKILQENQEIIKDRAGVEIKIKKAVVRDVKKHKGYAFEISDDLESVIEDKGIDIVVELMGGVEAPYLLAKKTLAKQKAFVTANKAMLAYHRYELEQIAKNTPIGFEASVCGGIPIIKALKDGLSANHILSFKGILNGTSNYILSQMFKNQASFKDALKDAQHLGYAELNPEFDIKGIDAAHKLLILASLAYGIDAKLEEILIEGIEKIEPDDMEFAKEFGYSIKLLGIAKKHQDCIELRVHPSMIKNECMLSKVDGVMNAISVIGDKVGETLYYGAGAGGEPTASAVISDIIEIARKKSSLMLGFETPQKLPLKPKEEIQCAYYARLLVSDEKGVFSQISAILAQNDISLNNVLQKEIPQSNKAKILFSTHTTNEKSMLNALKELENLQSVLDTPKMIRLEN

SEQ ID NO: 9468 - protein, 42 aa, Helicobacter pylori
  misc_feature (B) LOCATION 1...42
  hypothetical: YES
LGIIAKDSLMIKSYRCKRRVLCYNSKNHYYKIKDSHAFWIEY

SEQ ID NO: 9469 - protein, 119 aa, Helicobacter pylori
  misc_feature (B) LOCATION 1...119
  hypothetical: YES
MPFLPPMLGFLFLFYAKKYDHFLPSLSVFGCLFWFESMHLKTLGVLALLFLIYHQIVYKNSLKFFNDGFLFKTLHAFLVYYLYLSCFFSVSLGLKTLGLFALFALIEGALWGLYEKSSL

SEQ ID NO: 9470 - protein, 147 aa, Helicobacter pylori
  misc_feature (B) LOCATION 1...147
  hypothetical: YES
MLSLKQDSFFFLCLGIFGFYFYSLLRDLMPFLPPMLGFLFLFYAKKYDHFLPSLSVFGCLFWFESMHLKTLGVLALLFLIYHQIVYKNSLKFFNDGFLFKTLHAFLVYYLYLSCFFSVSLGLKTLGLFALFALIEGALWGLYEKSSL

SEQ ID NO: 9471 - protein, 88 aa, Helicobacter pylori
  misc_feature (B) LOCATION 1...88
  hypothetical: YES
LGGFCFEALFLNSLFLNSLFLNSLFLNSLFLNSLFLNSLFLNSLFLNSLFFWGGFDGKSFLAFLTIWLVKNLILIQAIAFKKALLFGV

SEQ ID NO: 9472 - protein, 77 aa, Helicobacter pylori
  misc_feature (B) LOCATION 1...77
  hypothetical: YES
MVSNSLNVFIAPLKSSFFIINFLAHGCNFIFLLQRQVNQNLPILFIVLELRQALCVAPFLCVFNRDNIAFDRASVYP

SEQ ID NO: 9473 - protein, 398 aa, Helicobacter pylori
  misc_feature (B) LOCATION 1...398
  hypothetical: YES
MTSASSHSFKEQDFHIPIAFAFDKNYLIPAGACIYSLLESIAKANKKIRYTLHALVVGLNEEDRAKLNQITEPFKEFAVLEVKDIEPFLDTIPNPFDEDFTKRFSKMVLVKYFLADLFPKYSKMVWSDVDVIFCNEFSADFLNIKENDENYFYGVLEVEKHHMMEGFLFCNLDYQRKKNFTLRMHELLKGNEAKGELDFTKWCWPNMKALGIEYCVFPYYYTIKDFSNAYLNENYKKTILEARENPTIIHYDAWWGAVKPWDYPFGLKADLWLNALAKTPFMSDYTKKMHTNESFYTTKMAEQHYFSSVKSSKEIVFKAPYLFFKSYLFVVFKERKIHSRVFELTCNLVKKFFNKLIYFVFLMPKALVKRAVSKILRVLGLHGIVKKILIKLKLLKKG

SEQ ID NO: 9474 - protein, 407 aa, Helicobacter pylori
  misc_feature (B) LOCATION 1...407
  hypothetical: YES
PLKKGVSFFMTSASNHSFKEQDFHIPIAFAFDKNYLIPAGACIYSLLESIAKANKKIRYTLHALVVGLNEEDRAKLNQITEPFKEFAVLEVKDIEPFLDTIPNPFDEDFTKRFSKMVLVKYFLADLFPKYSKMVWSDVDVIFCNEFSADFLNIKENDENYFYGVLEVEKHHMMEGFLFCNLDYQRKKNFTLRMHELLKGNEAKGELDFTKWCWPNMKALGIEYCVFPYYYTIKDFSNAYLNENYKKTILEARENPTIIHYDAWWGAVKPWDYPFGLKADLWLNALAKTPFMSDYTKKMHTNESFYTTKMAEQHYFSSVKSSKEIVFKAPYLFFKSYLFVVFKERKIHSRVFELTCNLVKKFFNKLIYFVFLMPKALVKRAVSKILRVLGLHGIVKKILIKLKLLKKG

SEQ ID NO: 9475 - protein, 89 aa, Helicobacter pylori
  misc_feature (B) LOCATION 1...89
  hypothetical: YES
VKMLGTLANPSNPSVKFTALLVDKKTNTQKPTANIVGISNKGFFKNGAYKKVSNPLRLNKTDTISERINSMPNFIFALIPALFCWLILV

SEQ ID NO: 9476 - protein, 110 aa, Helicobacter pylori
  misc_feature (B) LOCATION 1...110
  hypothetical: YES
SKYLENSAFPATYTKIERLKRVKMLGTLANPSNPSVKFTALLVDKKTNTQKPTANIVGISNKGFFKNGAYKKVSNPLRLNKTDTISERINSMPNFIFALIPALFCWLILV

SEQ ID NO: 9477 - protein, 91 aa, Helicobacter pylori
  misc_feature (B) LOCATION 1...91
  hypothetical: YES
LNERIRALFSGFNTSMHANEQEVTATLNANTENIKSEIKKLENQLIEETRMLLEQETQKSVKAYNAMMGHQPQNSLKHGLKNFNNPLSKEG

SEQ ID NO: 9478 - protein, 181 aa, Helicobacter pylori
  misc_feature (B) LOCATION 1...181
  hypothetical: YES
MNYPNLPNSTLEITQQPEVKEITNELLKQLQNALHSNALFTEQVELSLKGIVRILEVLLSLDFFKNANEIDSSLRNSIEWLSNAGESLKTKMKEYERFFSEFNTSMHANEQEVTATLNANTENIKSEIKKLENQLIEETRMLLEQETQKSVKAYNAMMGHQPQNSLKHGLKNFNNPLSKEG

SEQ ID NO: 9479 - protein, 623 aa, Helicobacter pylori
  misc_feature (B) LOCATION 1...623
  hypothetical: YES
MKAEATTLLGFFEENQNNQFVIPIYQRVYSWEKEQCEQLWDDIIKIGGNDKINGHFIGSILYVLDGNTPSSPLLIIDGQQRLTTITLLCIALRSHLSDEVKREEIESYLINSDKDGDKKFRLILSESDKDTLLSLIDKNKRKPSEPSVKIMENFKLFEKWISKNTDKLETIFKGLEKLMIVYIALDKEKDDPQLIFESMNSKGIELTQTDLIRNYIIMETETEEKQKDFYNGYWRAMEEDFKQNETLFNRFVRHYLTIKTGKIPNIKKVYGAFKDYQQKEGIEIEDLLKDLQKYCGYFCQIAFKKEANKDLNKALSFLVDLEMDVVYPLLLELYSDYSDGVLSDQDFTTISTLTESYLCRRAVCGLGTNSLNKIFPFFTKKIDKKQYLKSVEKHFGSLKGKQRFPNNDEFKDSFITIDFYKFKKNKYFLERLEKFDTNEPVDTQKCEIEHIMPQTLNPKWEGDLGENFEAIHEKYLHTIGNLTLTGYNAKYSNKSFQEKRDMEKGFKQSSLKLNKNLKDLEPFGEKEIEKRASDLVDWALKIWTYPILEAETLEEYKPKKEKKEKKEKKEKEEYKLKKEKKVYDLSSYKFSPHSRELFDILRKEIKTLDERVTENFNSKYIGL

SEQ ID NO: 9480 - protein, 632 aa, Helicobacter pylori
  misc_feature (B) LOCATION 1...632
  hypothetical: YES
NPLNQGVLFMKAEATTLLGFFEENQNNQFVIPIYQRVYSWEKEQCEQLWDDIIKIGGNDKINGHFIGSILYVLDGNTPSSPLLIIDGQQRLTTITLLCIALRSHLSDEVKREEIESYLINSDKDGDKKFRLILSESDKDTLLSLIDKNKGKPSEPSVKIMENFKLFEKWISKNTDKLETIFKGLEKLMIVYIALDKEKDDPQLIFESMNSKGIELTQTDLIRNYIIMETETEEKQKDFYNGYWRAMEEDFKQNETLFNRFVRHYLTIKTGKIPNIKKVYGAFKDYQQKEGIEIEDLLKDLQKYCGYFCQIAFKKEANKDLNKALSFLVDLEMDVVYPLLLELYSDYSDGVLSDQDFTTISTLTESYLCRRAVCGLGTNSLNKIFPFFTKKIDKKQYLKSVEKHFGSLKGKQRFPNNDEFKDSFITIDFYKFKKNKYFLERLEKFDTNEPVDTQKCEIEHIMPQTLNPKWEGDLGENFEAIHEKYLHTIGNLTLTGYNAKYSNKSFQEKRDMEKGFKQSSLKLNKNLKDLEPFGEKEIEKRASDLVDWALKIWTYPILEAETLEEYKPKKEKKEKKEKKEKEEYKLKKEKKVYDLSSYKFSPHSRELFDILRKEIKTLDERVTENFNSKYIGL

SEQ ID NO: 9481 - protein, 306 aa, Helicobacter pylori
  misc_feature (B) LOCATION 1...306
  hypothetical: YES
LKSIFKKLGSVALYSLVVYGGLNAINTALLPSEYKELVALGFKKIKTLYQRHDDKEITKEEKEFATNALREKLRNDRARVEQIQKNIEAFEKKNNSSVQKKAAKHRGLQELNEINANPLNDNPNGNSSTETKSNKDDNFDEMINKVNESFVKPAAPLVPDEWRTPEIEIIINECIISSNDYDGLRKCLIKGIKDQKILAPLLEKIQEIETENNKFSRQHLSGLKLALNNSDNRTFLIASCAICEKRKKEMEQENNYQDTTNASEFGTTDTKENEAKDATFSNNRSKSELPNSVINQIEQSIAHGKK

SEQ ID NO: 9482 - protein, 312 aa, Helicobacter pylori
  misc_feature (B) LOCATION 1...312
  hypothetical: YES
IGKETLLKSIFKKLGSVALYSLVVYGGLNAINTALLPSEYKELVALGFKKIKTLYQRHDDKEITKEEKEFATNALREKLRNDRARVEQIQKNIEAFEKKNNSSVQKKAAKHRGLQELNEINANPLNDNPNGNSSTETKSNKDDNFDEMINKVNESFVKPAAPLVPDEWRTPEIEIIINECIISSNDYDGLRKCLIKGIKDQKILAPLLEKIQEIETENNKFSRQHLSGLKLALNNSDNRTFLIASCAICEKRKKEMEQENNYQDTTNASEFGTTDTKENEAKDATFSNNRSKSELPNSVINQIEQSIAHGKK

SEQ ID NO: 9483 - protein, 127 aa, Helicobacter pylori
  misc_feature (B) LOCATION 1...127
  hypothetical: YES
MGMAAISWKIKIPTALFPIGVLSCLESSKNFNTMAVEESESPMPKTREKMGERPRTKYPNKKAIKAHKTTCKSPKTSTSCLMDLSLSKLNSMPIINIKKTIPNSPISDNKLKSLILKKAAKTVPVQM

SEQ ID NO: 9484 - protein, 139 aa, Helicobacter pylori
  misc_feature (B) LOCATION 1...139
  hypothetical: YES
ESLLPRIVKIKSMGMAAISWKIKIPTALFPIGVLSCLESSKNFNTMAVEESESPMPKTREKMGERPRTKYPNKKAIKAHKTTCKSPKTSTSCLMDLSLSKLNSMPIINIKKTIPNSPISDNKLKSLILKKAAKTVPVQM

SEQ ID NO: 9485 - protein, 93 aa, Helicobacter pylori
  misc_feature (B) LOCATION 1...93
  hypothetical: YES
RAKRQFEAGFGPNNIGSVVQVGLSGIIQILIKEKNENIVLFNRCDSLELFQKEEPIAQEPKKDERESKEWLDSKEALFSNSKNRAILENLHKS

SEQ ID NO: 9486 - protein, 93 aa, Helicobacter pylori
  misc_feature (B) LOCATION 1...93
  hypothetical: YES
KVTRMQRELRLLNNKHCIEYLQFLSKNHLSFNLSCERDAIDFSPKLPKEIHEKFGSLVLFILAGYTLESLMIDAQSGNLKPGLALTILAAWFK

SEQ ID NO: 9487 - protein, 162 aa, Helicobacter pylori
  misc_feature (B) LOCATION 1...162
  hypothetical: YES
MQRELRLLNNKHCIEYLQFLSKNHLSFNLLCERDAIDFSPKLPKEIHEKFGSLVLFILAGYTLESLMIDAQSVQFEAGFGPNNIGSVVQVGLSGIIQILIKEKNENIVLFNRCDSLELFQKEEPIAQEPKKDERESKEWLDSKEALFSNSKNRAILENLHKS

SEQ ID NO: 9488 - protein, 210 aa, Helicobacter pylori
  misc_feature (B) LOCATION 1...210
  hypothetical: YES
FPHGLRYNLALAKANGVSLIFCEEDSYLNILHAKEVLDNNPEIIDSVNEKLKKYQLVYEKGVEVVYLNEWVNEFLAWELKSPFDAFLGAEFSRIKPSDHFFNKIHLKAPHFLESFQNYAPLLEVNEVSGLLQCAHLRYLGIDLGADFLIVHSLGLFHAFENLSLKASKIYKRDNDNTPTLFLPQIALMAMGEKNKQTLGLDAHYHKVTFI

SEQ ID NO: 9489 - protein, 211 aa, Helicobacter pylori
  misc_feature (B) LOCATION 1...211
  hypothetical: YES
KLEDFFKQVPYTTKGEKEELEKFIQINFINPQTNPKYLGDGFFLYVKWLMKRYPTERNRLLEMISKPESGVMNFLSVAHYLYKNDDNIDHEIYELQEMLTNSKIKPWKDFSKNLLSLFQYNSNPPKTPNPPKTCALFNAYAKHLNAQALLKSAKLYLERMGQKVIDLPFCYDGGYYGKIISTHDFLTACAIIWLWLKPMAFRSFFAKKIRI

SEQ ID NO: 9490 - protein, 496 aa, Helicobacter pylori
  misc_feature (B) LOCATION 1...496
  hypothetical: YES
LMSVLKLHVKAFRFETNKDYNPAYESYFLEYQEDQYLLDLLKQLKGVSYNENIALKINQIAVFEDAKVSDLVAFFSKEWVLDPLSKRYALKDLMIDEKEVLKNYEDFFKQVPYITKGEKEELEKFIQINFINPQTNPKYLGDGFFLYVKWLMKRYPTERNRLLEMISKPESGVMNFLSVAHYLYKNDDNIDHEIYELQEMLTNSKIKPWKDFSKNLLSLFQYNSNPPKTPNPPKTCALFNAYAKHLNAQALLKSAKLYLERMGQKVIDLPFCYDGGYYGKIISTHDFLTACAYNLALAKANGVSLIFCEEDSYLNILHAKEVLDNNPEIIDSVNEKLKKYQLVYEKGVEVVYLNEWVNEFLAWELKSPFDAFLGAEFSRIKPSDHFFNKIHLKAPHFLESFQNYAPLLEVNEVSGLLQCAHLRYLGIDLGADFLIVHSLGLFHAFENLSLKASKIYKRDNDNTPTLFLPQIALMAMGEKNKQTLGLDAHYHKVTFI

SEQ ID NO: 9491 - protein, 137 aa, Helicobacter pylori
  misc_feature (B) LOCATION 1...137
  hypothetical: YES
SAGYSWHCFFSACTITSISHTIKDKVYTFFKKQPNSGYGTDFDGIAKTQIKAAILPIDRLSEPFESYIVGSIKGRQSMARAYGYPKVFTIDEISGWEKETIKSRDYERRNLSKTYRLSAKQNLEIIKISNALAQGKA

SEQ ID NO: 9492 - protein, 293 aa, Helicobacter pylori
  misc_feature (B) LOCATION 1...293
  hypothetical: YES
EKSALKNGASNRVVSLNNNKKERVMLLNYDFLERMEGSKVRAIDEKMKFLHCSNSIDRLILSYKMNLIKGSTIESANLSRVVNKIKNGLPFGTISAFRPFKPEFITDFTEEEREKLIEAYMSGYKHSKADRVTKNWNGNSNFIDAYYDADAFLRGNGTIYAKLCKGLGKLFVNKFLNPKSEAPMKDFMSSKEFVKRYRYTSKDNMERTRQPKSFLNFKRDFLGYIEVVGYWSLKDGLLTDKETSFFVFQNEPSDTFNLKKTLLVLARAFSQAAICYCQNASANEVDLISTEPE

SEQ ID NO: 9493 - protein, 411 aa, Helicobacter pylori
  misc_feature (B) LOCATION 1...411
  hypothetical: YES
MLLNYDFLERMEGSKVRAIDEKMKFLHCSNSIDRLILSYKMNLIKGSTIESANLSRVVNKIKNGLPFGTISAFRPFKPEFITDFTEEEREKLIEAYMSGYKHSKADRVTKNWNGNSNFIDAYYDADAFLRGNGTIYAKLCKGLGKLFVNKFLNPKSEAPMKDFMSSKEFVKRYRYTSKDNMERTRQPKSFLNFKRDFLGYIEVVGYWSLKDGLLTDKETSFFVFQNEPSDTFNLKKTLLVLARAFSQAAICYCQNASANEVDLISTEPGSYGEVWDTFNGIAFSAPVQLPQFLTRLKDKVYTFFKKQPNSGYGTDFDGIAKTQIKAAILPIDRLSEPFESYIVGSIKGRQSMARAYGYPKVFTIDEISGWEKETIKSRDYERRNLSKTYRLSAKQNLEIIKISNALAQGKA

SEQ ID NO: 9494 - protein, 128 aa, Helicobacter pylori
  misc_feature (B) LOCATION 1...128
  hypothetical: YES
MSDFKVPPKAKGFKRLFKALFYSKDGLKCAWAEESAFRQIVILALFCIVLASYLTKDFLEWGLLILPCFLSVVIELINSSIEKAVDFTGTEFHPLAKKAKDMASSAQLIGLIFWAFIWGRYLLTLYFN

SEQ ID NO: 9495 - protein, 286 aa, Helicobacter pylori
  misc_feature (B) LOCATION 1...286
  hypothetical: YES
MDKNRDVHAIMTNVIKSLERGGSFSSSDRAKFVQAARTHGIEDSVIEEIIDIGQTLSLIYRHEDLIDASDLPREQKKAVHAELQKSIDENLEVLKKNHKHLKEKNMPLPFILGGLALVAAGYGVKKGIDALDADCEADEFIKKAESLKEEATKKAESAESDCRRAFMRLGEKKLHVLSHTVSNFLDHFHRLNRLRITIGIKDIDMQDLRKQISNARNLLNQLNTNGIDGDSALGVIAGCGGLGASGFTAGATGAVLGGGLAASGLAGMTVLGGLVCSSCTRYFGGY

SEQ ID NO: 9496 - protein, 297 aa, Helicobacter pylori
  misc_feature (B) LOCATION 1...297
  hypothetical: YES
PWKNRNLKEKSMDKNRDVHAIMTNVIKSLERGGSFSSSDRAKFVQAARTHGIEDSVIEEIIDIGQTLSLIYRHEDLIDASDLPREQKKAVHAELQKSIDENLEVLKKNHKHLKEKNMPLPFILGGLALVAAGYGVKKGIDALDADCEADEFIKKAESLKEEATKKAESAESDCRRAFMRLGEKKLHVLSHTVSNFLDHFHRLNRLRITIGIKDIDMQDLRKQISNARNLLNQLNTNGIDGDSALGVIAGCGGLGASGFTAGATGAVLGGGLAASGLAGMTVLGGLVCSSCTRYSGGY

SEQ ID NO: 9497 - protein, 241 aa, Helicobacter pylori
  misc_feature (B) LOCATION 1...241
  hypothetical: YES
MAKRSIAYLDSVFDISYTFIDHHSPLNALFLHGWGSSKEIMQQAFQGCFLNYNHLYVDLPGFNQSPNDEKVLETKDYANIINLFLKSVGKKAHVVFGHSFGGKVAILCENERMVLLSSAGILEPKPLKVRCKILLAKIFKKLGLNLGFLRSKDAMGLNQVMYETFKKVISEDFSDHFKRCEKEVLLFWGKDDKATPLSSAQTMRTLLKKSELFVLEGDYFFFLNQLKEIEKLVENYHHAKS

SEQ ID NO: 9498 - protein, 241 aa, Helicobacter pylori
  misc_feature (B) LOCATION 1...241
  hypothetical: YES
MAKRSIAYLDSVFDISYTFIDHHSPLNALFLHGWGSSKEIMQQAFQGCFLNYNHLYVDLPGFNQSPNDEKVLETKDYANIINLFLKSVGKKAHVVFGHSFGGKVAILCENERMVLLSSAGILEPKPLKVRCKILLAKIFKKLGLNLGFLRSKDAMGLNQVMYETFKKVISEDFSDHFKRCEKEVLLFWGKDDKATPLSSAQTMRTLLKKSELFVLEGDHFFFLNQAKEIEKLVENYHHAKS

SEQ ID NO: 9499 - protein, 497 aa, Helicobacter pylori
  misc_feature (B) LOCATION 1...497
  hypothetical: YES
QRLGIDRLDKSMKIDHQESSDEVKIYHIDDEIELVDTPGLFGFKVKTHDSGKTERYKDITKKYISEAHLILYALNPSNPIKESHKDDLNWLFRTLNLLSRTIFVISRFDEEADIEDEEDYNKRFKIKKENIQNRLDELISLSEEEKESLMIVAVAANPFDLGVEHWLKHQEEFQKLSHIKALQDATQKKIKENGGKLTIIEEAKKSVIQDVVYRQMPPAKQALQDINREMEYLNKTLEKRRKEIQDLNKEISQARIHLREFIIRYFSDLIRQVSGASLETFNDFVIREIGDEYINMETRVKNEFEKQTQGISNEIAKIGTTFNSDMSSFEKHARTFGRIGIKLLEQSKFINATNIKLTRDGIVAVAKFTGIDLALKFKPWGTVKLAGNINKALPLIGLAFEAWDSYNKYQKQQEFEKTKREMESHFNNQKQEILALINDETRFKQTCFPMALELEETIQACEESVKKTQECAQGLEKWIQTGEDFIKGEDIIDVEPE

SEQ ID NO: 9500 - protein, 569 aa, Helicobacter pylori
  misc_feature (B) LOCATION 1...569
  hypothetical: YES
MKNETLEQFKRNQKRNQEILKKLLDFVHTGEEYGIKVEESLKDKIRNAMENVAGQKLKVALVGGFSEGKTSIAAAWIDRLDKSMKIDHQESSDEVKIYHIDDEIELVDTPGLFGFKVKTHDSGKTERYKDITKKYISEAHLILYALNPSNPIKESHKDDLNWLFRTLNLLSRTIFVISRFDEEADIEDEEDYNKRFKIKKENIQNRLDELISLSEEEKESLMIVAVAANPFDLGVEHWLKHQEEFQKLSHIKALQDATQKKIKENGGKLTIIEEAKKSVIQDVVYRQMPPAKQALQDINREMEYLNKTLEKRRKEIQDLNKEISQARIHLREFIIRYFSDLIRQVSGASLETFNDFVIREIGDEYINMETRVKNEFEKQTQGISNEIAKIGTTFNSDMSSFEKHARTFGRIGIKLLEQSKFINATNIKLTRDGIVAVAKFTGIDLALKFKPWGTVKLAGNINKALPLIGLAFEAWDSYNKYQKQQEFEKTKREMESHFNNQKQEILALINDETRFKQTCFPMALELEETIQACEESVKKTQECAQGLEKWIQTGEDFIKGEDIIDVEPE

SEQ ID NO: 9501 - protein, 183 aa, Helicobacter pylori
  misc_feature (B) LOCATION 1...183
  hypothetical: YES
VEFKTLEEVFEIRNGYTPSKNNPEFWKNGTIPWFRMEDLRENGRILKDSIQHITPKALKGKKLFPKNSIIISTTATIGEHALLIVDSLANQQFTFLSKKANCDIALDMKFFFYQCFLLGEWCKNNTNVSGFASVDMTAFKKYKFPIPPLEIQQEIVTILDAFTELNTELNARKKQYEYYQNML

SEQ ID NO: 9502 - protein, 84 aa, Helicobacter pylori
  misc_feature (B) LOCATION 1...84
  hypothetical: YES
MVAPIIKGNFKIHHRIACQNAILHRFLDTLIHRRDIFFRDHAPRNFIHKFIPTARLFRLKLDKHMPVLPTATTLLSVFMLFAHA

SEQ ID NO: 9503 - protein, 88 aa, Helicobacter pylori
  misc_feature (B) LOCATION 1...88
  hypothetical: YES
RIHIMVAPIIKGNFKIHHRIACQNAILHRFLDTLIHRRDIFFRDHAPRNFIHKFIPTARLFRLKLDKHMPVLPTATTLLSVFMLFAHA

SEQ ID NO: 9504 - protein, 410 aa, Helicobacter pylori
  misc_feature (B) LOCATION 1...410
  hypothetical: YES
MPKKELLKMSKKRIFKDFLEEVKRHRPIIFYTDNDCDGMLAGSVLMSMCYRLGIKDFFFFSPLRNAHGYGFTDLALNDLLSQLCIFNPKTNQLVRLDYIKNQFQKTPLLFSADLGADLVSNIELQKILLERFEQCIITDHHKSFEVDWIDKNKIAYINLNDEKDANYYSGAFTSALVFSQIFQIQTTPLEEELIAITLLSDRIDLDNGDNLDMVLNLAQPKHDRIECFFKDKDLSLAQDDLDEISNLYGFNCINYINALSRLSGAREFKGCYNSYLHYLVLKHFNPISDPRLSVFNVKEFKRYNDIKKKMVKESEENAQIFSCNKILVAILDESCSIKVGVSGLVANNFLKKYPFNHSLCIYKDSKDGYSGSARGDGTFLSQIKTIPLIQAGGHEEAFGLSFAKKRILKK

SEQ ID NO: 9505 - protein, 411 aa, Helicobacter pylori
  misc_feature (B) LOCATION 1...411
  hypothetical: YES
SMPKKELLKMSKKRIFKDFLEEVKRHRPIIFYTDNDCDGMLAGSVLMSMCYRLGIKDFFFFSPLRNAHGYGFTDLALNDLLSQLCIFNPKTNQLVRLDYIKNQFQKTPLLFSADLGADLVSNIELQKILLERFEQCIITDHHKSFEVDWIDKNKIAYINLNDEKDANYYSGAFTSALVFSQIFQIQTTPLEEELIAITLLSDRIDLDNGDNLDMVLNLAQPKHDRIECFFKDKDLSLAQDDLDEISNLYGFNCINYINALSRLSGAREFKGCYNSYLHYLVLKHFNPISDPRLSVFNVKEFKRYNDIKKKMVKESEENAQIFSCNKILVAILDESCSIKVGVSGLVANNFLKKYPFNHSLCIYKDSKDGYSGSARGDGTFLSQIKTIPLIQAGGHEEAFGLSFAKKRILKK

SEQ ID NO: 9506 - protein, 46 aa, Helicobacter pylori
  misc_feature (B) LOCATION 1...46
  hypothetical: YES
LSVMAQASLTVRHTSQAETKVGHSDPVVLCGRAIAQRIKGTPGITG

SEQ ID NO: 9507 - protein, 63 aa, Helicobacter pylori
  misc_feature (B) LOCATION 1...63
  hypothetical: YES
KVTEACKGWLIAVGNRKLSVMAQASPTIRTTPSAETIFGHSDPVVLCGRAIAQRIKGTPGITG

SEQ ID NO: 9508 - protein, 27 aa, Helicobacter pylori
  misc_feature (B) LOCATION 1...27
  hypothetical: YES
MQALGLPFSPFARHYLGNLVDFFSSSY

SEQ ID NO: 9509 - protein, 82 aa, Helicobacter pylori
  misc_feature (B) LOCATION 1...82
  hypothetical: YES
MDKDQKRQHQNRYNEHHTPVGSFTLGSFRVGSLGGVGGVGGVGSVVFWLSLFSLFSFGGFCHNSVKAAAFLGSILARILPNS

SEQ ID NO: 9510 - protein, 217 aa, Helicobacter pylori
  misc_feature (B) LOCATION 1...217
  hypothetical: YES
LSLKFFRKNIVLKVVPRLAFGVLWLLHKTCKNRYFLAQDLKEKPFIVSCWHGELGMIGFAYLRLQKPSVYVIASQHFDGSIAAGLFESFGFKNIRGSSKKGGVKVLIEGLKRLKEGCDVAITPDGPKGPRHSIADGVIALAQKSGVGISACRVVCKNAWRLNTWDQFEIPKPFSEVRYYMLESVIIPKEWELSKAKEYLKTRMDSVGFEESQRGLGA

SEQ ID NO: 9511 - protein, 220 aa, Helicobacter pylori
  misc_feature (B) LOCATION 1...220
  hypothetical: YES
RQELSLKFFRKNIVLKVVPRLAFGVLWLLHKTCKNRYFLAQDLKEKPFIVSCWHGELGMIGFAYLRLQKPSVYVIASQHFDGSIAAGLFESFGFKNIRGSSKKGGVKVLIEGLKRLKEGCDVAITPDGPKGPRHSIADGVIALAQKSGVGISACRVVCKNAWRLNTWDQFEIPKPFSEVRYYMLESVIIPKEWELSKAKEYLKTRMDSVGFEESQRGLGA

SEQ ID NO: 9512 - protein, 512 aa, Helicobacter pylori
  misc_feature (B) LOCATION 1...512
  hypothetical: YES
LVFVFLFRCVNEKTSLNFTPLLEQMALHLQVRFYSVYKDNMTSFYLQASAEITLEFAQKLSEILPFSLDFSFLSLKEITEPLDENLFQTTSLSKPLFMNAKEHQDFLDNNSSLYANTLGLIENTAFKGKMIHSPKELIDCLTQLKGMLKTQDFIPISTSRGALSFSLKNPSPSVIFSDLSSVLTCTKLPLENAKYLASLEKPSIKAPLKSVFKDTFKNDEIIAQLPYDPILNLLCHILQDEGIEFVFMHESHSCEALLHYEALFKTPKRLITPTKNFVLENHLSTLPFKDELEFLRETPNSIVLYFSFKRPTRLLLHANGSLKTLLSVGFDFNQIFNLLKQDEKASRMLKNYATKFPDFYARIVELSQYNLVGANLLDFFRILGFVLGYSEDFHSHSVISLAKECLRPKGPRIDYKILKDDSLKMALNFSKIMHSAMSFRLAGVENEILSLGILDSLAEFLGNFIWDNVQNFSVQEVTIAGDFFGEKVFLDLFVRYFPKTLALKTHAFLDYE

SEQ ID NO: 9513 - protein, 524 aa, Helicobacter pylori
  misc_feature (B) LOCATION 1...524
  hypothetical: YES
IVSLNSLIRVFELVFVFLFRCVNEKTSLNFTPLLEQMALHLQVRFYSVYKDNMTSFYLQASAEITLEFAQKLSEILPFSLDFSFLSLKEITEPLDENLFQTTSLSKPLFMNAKEHQDFLDNNSSLYANTLGLIENTAFKGKMIHSPKELIDCLTQLKGMLKTQDFIPISTSRGALSFSLKNPSPSVIFSDLSSVLTCTKLPLENAKYLASLEKPSIKAPLKSVFKDTFKNDEIIAQLPYDPILNLLCHILQDEGIEFVFMHESHSKEALLHYEALFKTPKRLITPTKNFVLENHLSTLPFKDELEFLRETPNSIVLYFSFKRPTRLLLHANGSLKTLLSVGFDFNQIFNLLKQDEKASRMLKNYATKFPDFYARIVELSQYNLVGANLLDFFRILGFVLGYSEDFHSHSVISLAKECLRPKGPRIDYKILKDDSLKMALNFSKIMHSAMSFRLAGVENEILSLGILDSLAEFLGNFIWDNVQNFSVQEVTIAGDFFGEKVFLDLFVRYFPKTLALKTHAFLDYE

SEQ ID NO: 9514 - protein, 99 aa, Helicobacter pylori
  misc_feature (B) LOCATION 1...99
  hypothetical: YES
MRKNHSKYSNIIPKNQFFGVLFGIKNQTIVFQESPFFKGVFLRQRTSAFYLFCCQYTDSKAILWYFLHRIFKAFVLSITIPTIYGFSPKPCGRKSFFNL

SEQ ID NO: 9515 - protein, 119 aa, Helicobacter pylori
  misc_feature (B) LOCATION 1...119
  hypothetical: YES
MTTWNMGLPKNKLMSEHTTTTIKAIKSILPIFARSFLVLRAYTLIKPKTIVVMPKACQTAPKPAFAITIPNKGTKVTPDNEVKANSMNKFKPGLDLENIKPKNATISAIKNTHLYCTTA

SEQ ID NO: 9516 - protein, 129 aa, Helicobacter pylori
  misc_feature (B) LOCATION 1...129
  hypothetical: YES
RLNKIALAPAMTTWNMGLPKNKLMSEHTTTTIKAIKSILPIFARSFLVLRAYTLIKPKTIVVMPKACQTAPKPAFAITIPNKGTKVTPDNEVKANSMNKFKPGLDLENIKPKNATISAIKNTHLYCTTA

SEQ ID NO: 9517 - protein, 345 aa, Helicobacter pylori
  misc_feature (B) LOCATION 1...345
  hypothetical: YES
MAFKKARLISRFISKGSFKLNKISKKFFTLNQILKREKPLKRHKKTKSIEKPFNKNKSFLKASVLLIGALGGLSHLRANECRYWSWSSWSYQDNIESGPNSPTHNSYCLFSSAQGSGTYYLNTLTTYSAGGASFTQKFNGGTLDIGGNIRFGGTGINGGDVGYITGTYNAQTMNFNSSHITTGNSYADGGGTTLNFNATNNITINQASFDNSDAGTQKSYMNFKGSNIKISGSSFTDDTNGGFNFSGNNNNSTISFNQTSFNQGTYNFSNSATLSFNNSNFNQGTYHFNSAQSTFENSNFNQGTYNFNDNTSFNNDTFNQGTYNFNSSKVSFSGANTLNSKFAFC

SEQ ID NO: 9518 - protein, 658 aa, Helicobacter pylori
  misc_feature (B) LOCATION 1...658
  hypothetical: YES
IPSSPFASLKGSVSFNSGAIFNLNQTLNNNQTYDILTTNGAIQYGVYQSYLWDLINYKGDKAISHVEVSNNTYDVTFDINGQDETLQETFSNQSIITQFLGDDLQQQAQQTYQEDVANSQNALNKVASDNTIANNDTSYTQSSNPTILKDAQGLENTNQQIQQDEKALEKDLAQIKQLANSTTGFNEQAFTQAQKQEQQDEQALQNDENAFNTEQEGLEQAIANAKHANPTPNPTPSPTPTPIKHTAPNTPPSQVPPTPPSQNLPKTNVWNGVYWLQNKTYSNKGIYYIDPNLSGQSGQSGNTLSTYTANLLGRSFGVNANNGTLIIGNNTESVNDNGLIWIGHGGFGYITGTFSAANIYLTNNFKTGEGVSNSDGGGANITFKASDNITMDGLNYNNAETVTKMIQTGASQHSYTTFDATNNISVTDSDFSDMTWGKFSFSAKNISFSNASFSGFTNPGGSSTISTNASNSLSFTDSRLNGGAIYNLQANSLIFNNTQAVFNVLYSRGTSNFNATTQLLGNTSFTLSSQSLLNFNGDTTLQNNANITLGNKSQAAFKNSLTLDNNSNLSLDNQSVLNANGTSAFNNQASLNIYNGSQAAFSSLFFNGGTLSLNANSKLNASSASFSNNTTINLDDSVLNANNTSSLNANINFQRKPG

SEQ ID NO: 9519 - protein, 996 aa, Helicobacter pylori
  misc_feature (B) LOCATION 1...996
  hypothetical: YES
MAFKKARLISRFISKGSFKLNKISKKFFTLNQILKREKPLKRHKKTKSIEKPFNKNKSFLKASVLLIGALGGLSHLRANECRYWSWSSWSYQDNIESGPNSPTHNSYCLFSSAQGSGTYYLNTLTTYSAGGASFTQKFNGGTLDIGGNIRFGGTGINGGDVGYITGTYNAQTMNFNSSHITTGNSYADGGGTTLNFNATNNITINQASFDNSDAGTQKSYMNFKGSNIKISGSSFTDDTNGGFNFSGNNNNSTISFNQTSFNQGTYNFSNSATLSFNNSNFNQGTYHFNSAQSTFENSNFNQGTYNFNDNTSFNNDTFNQGTYNFNSSKVSFSGANTLNSSSPFASLKGSVSFNSGAIFNLNQTLNNNQTYDILTTNGAIQYGVYQSYLWDLINYKGDKAISHVEVSNNTYDVTFDINGQDETLQETFSNQSIITQFLGDDLQQQAQQTYQEDVANSQNALNKVASDNTIANNDTSYTQSSNPTILKDAQGLENTNQQIQQDEKALEKDLAQIKQLANSTTGFNEQAFTQAQKQEQQDEQALQNDENAFNTEQEGLEQAIANAKHANPTPNPTPSPTPTPIKHTAPNTPPSQVPPTPPSQNLPKTNVWNGVYWLQNKTYSNKGIYYIDPNLSGQSGQSGNTLSTYTANLLGRSFGVNANNGTLIIGNNTESVNDNGLIWIGHGGFGYITGTFSAANIYLTNNFKTGEGVSNSDGGGANITFKASDNITMDGLNYNNAETVTKMIQTGASQHSYTTFDATNNISVTDSDFSDMTWGKFSFSAKNISFSNASFSGFTNPGGSSTISTNASNSLSFTDSRLNGGAIYNLQANSLIFNNTQAVFNVLYSRGTSNFNATTQLLGNTSFTLSSQSLLNFNGDTTLQNNANITLGNKSQAAFKNSLTLDNNSNLSLDNQSVLNANGTSAFNNQASLNIYNGSQAAFSSLFFNGGTLSLNANSKLNASSASFSNNTTINLDDSVLNANNTSSLNANINFQRKPG

SEQ ID NO: 9520 - protein, 159 aa, Helicobacter pylori
  misc_feature (B) LOCATION 1...159
  hypothetical: YES
MKTFEVMIQTDSQGYLDAKFGGNAPRGFLNPNGLPTYSPKISWQKVEGAKSYALELIDHDAQKVCGMPFVHWVVGNISYNVLEENASMMDKRIVQGVNSLTQGFIRSSLNESEKQRSNLNNSVYIGPMPPNGDHHYLIQVYALDIPKLELKPLFLRRFA

SEQ ID NO: 9521 - protein, 197 aa, Helicobacter pylori
  misc_feature (B) LOCATION 1...197
  hypothetical: YES
PPKINSYTIIKNNYSNIMFQSKMCFYDHATIKENDFKEKGLKMKTFEVMIQTDSQGYLDAKFGGNAPRGFLNPNGLPTYSPKISWQKVEGAKSYALELIDHDAQKVCGMPFVHWVVGNISYNVLEENASMMDKRIVQGVNSLTQGFIRSSLNESEKQRSNLNNSVYIGPMPPNGDHHYLIQVYALDIPKLELKPLFS

SEQ ID NO: 9522 - protein, 208 aa, Helicobacter pylori
  misc_feature (B) LOCATION 1...208
  hypothetical: YES
MFQSKMCFYDHATIKENDFKEKGLKMKTFEVMIQTDSQGYLDAKFGGNAPRGFLNPNGLPTYSPKISWQKVEGAKSYALELIDHDAQKVCGMPFVHWVVGNISYNVLEENASMMDKRIVQGVNSLTQGFIRSSLNESEKQRSNLNNSVYIGPMPPNGDHHYLIQVYALDIPKLELKAPFFLGDLHDKMRNHIIAIGRKEFLYKQFVRK

SEQ ID NO: 9523 - protein, 205 aa, Helicobacter pylori
  misc_feature (B) LOCATION 1...205
  hypothetical: YES
LEILRRECGAVEENAYIVKLSSGVDFIIDPGFSSSEWVLENAKNPKAILITHGHYDHVWDSAQLSKALKGTPIYAPKDDVFMLENDIFHLGMPVFSPTFSVPCNKGCTTLEIANTTIKYWHFPGHTPGCSIIEIEGVIFSGDFIFYRSIGRYDFPYSNEKDMKESLLRFQNLDFPKDIEIYPGHGDKTSFFAEREHSKIWVSRMA

SEQ ID NO: 9524 - protein, 206 aa, Helicobacter pylori
  misc_feature (B) LOCATION 1...206
  hypothetical: YES
SLEILRRECGAVEENAYIVKLSSGVDFIIDPGFSSSEWVLENAKNPKAILITHGHYDHVWDSAQLSKALKGTPIYAPKDDVFMLENDIFHLGMPVFSPTFSVPCNKGCTTLEIANTTIKYWHFPGHTPGCSIIEIEGVIFSGDFIFYRSIGRYDFPYSNEKDMKESLLRFQNLDFPKDIEIYPGHGDKTSFFAEREHSKIWVSRMA

SEQ ID NO: 9525 - DNA (genomic), 186 bp, Helicobacter pylori; double-stranded, circular
  misc_feature (B) LOCATION 1...186
  hypothetical: NO
  anti-sense: NO
atggccgaagaagaaaagaccgaactccctagcgcgaaaaaaatccaaaaagccagagaagaaggcaatgtgcctaaaagcatggaagtggtgggggtttttagggttattggctgggctaatgagtatttttgttttttttatatggtgggtgggatggctttagcgagatgtatcgccatgtgt

SEQ ID NO: 9526 - DNA (genomic), 783 bp, Helicobacter pylori; double-stranded, circular
  misc_feature (B) LOCATION 1...783
  hypothetical: NO
  anti-sense: NO
atgtctgaggatttgccttttgcgagcgattcgcaattcacttacaatggggtgagcatcacgcgccccactaatgaggtcaatgatgtgatcagcggggttaatatcactttagagcaaaccacagagcctaataagcctgccattatcagcgtgagcagagacaatcaagccattatagacagccttaaagaatttgtcaaagcctataatgagcttatccctaaactagacgaagacacgcgctatgacgctgacactaaaatcgccgggatttttaacggcgtgggcgatattcgtgccattagatcctctcttaataatgtgttttcttatagcgtgcatacggataatggggtagaaagcttgatgaaatacgggcttagtttagacgataagggcgtgatgagtttggatgaagctaaattatcaagtgcattaaattctaaccctaaagcgactcaagattttttctatgggagcgatagcaaggatatggggggcagagaaatccaccaagagggcattttttctaaattcaatcaagtcatcgctaacctcatagatggagggaacgctaaattaaagatttatgaagattccctagacagagacgctaaaagcctgaccaaagacaaagaaaacgctcaagagcttttaaaaacccgctataacatcatggcggagcgctttgccgcttatgatagtcaaatctctaaagccaatcaaaaattcaattccgtgcaaatgatgatcgatcaagcagcggctaaaaagaattaa

SEQ ID NO: 9527 - DNA (genomic), 618 bp, Helicobacter pylori; double-stranded, circular
  misc_feature (B) LOCATION 1...618
  hypothetical: NO
  anti-sense: NO
gtgcgtttgaatgcggcggttgtggtggatggcaagtataaaatcgcgctcgaagacggggcaaacgctttagaatacgagcctttaagcgatgaatsgsttaaaaaaatcaacgycctagtcaaacaagccattggtgataaccaaaatagaggcgatgacgtggcggtgagtaattttgagtttaaccctatggtgcctatgattgacaacgccaccttgagtgaaaaaatcatctataaaacccaaaaaattttaggtttatttatgtttttaatcaaggtatatttggtgtttatagtgttattcattttctataaaaaagtgatcgtgcctttcagcgaacgcatgctggaagtggtgcctgatgaagataaggaagtgaaatccatgtttgaagaaatgaacgaagaagaagatgagttgaacaaactcggcgatttgaggaaaaaagtagaagatcaattagggcttaatgcaagctttagcgaagaagaagtaagatatgaaattattttagaaaagattagaggaacccttaaagagcgtcctgatgaaatcgccacgctctttaaactcttaatcaaagatgaaatctcttcagacagcgcgaaaggt

SEQ ID NO: 9528 - DNA (genomic), 240 bp, Helicobacter pylori; double-stranded, circular
  misc_feature (B) LOCATION 1...240
  hypothetical: NO
  anti-sense: NO
atgctggtgggtatcagtaacgctattaatatcattgacgggtttaacgggcttgcatctgggatttgcgcgatcgcgcttttagtcattcattatatagaccstagcagtttgtcttgtttgctcgcttacatggtgcttggggtttatggtgttaaawttcccttcaggaaagattttttaggwcgatcgggggggcgtattttttgggtttggtgwrcggratttctctcttgcatt

SEQ ID NO: 9529 - DNA (genomic), 249 bp, Helicobacter pylori; double-stranded, circular
  misc_feature (B) LOCATION 1...249
  hypothetical: NO
  anti-sense: NO
atgccggataayttgcatttgcacacccttttatytaaattcttgcaacaacgctctttcaattaccctaaccctttatgcgcgtttatccttattctatgcaacctgccttttattttaataagcgttttgtttcgcttggacgcttatgcgctcattgtgattagcctagtctttatcrcatgctatttaataggctmtgcttatttgaataggcaagtttgcgctttagaaaagcgggcgttttaa

SEQ ID NO: 9530 - DNA (genomic), 459 bp, Helicobacter pylori; double-stranded, circular
  misc_feature (B) LOCATION 1...459
  hypothetical: NO
  anti-sense: NO
gtgggcgctaaccctgtgccgcatgcgcaaatcttgcaatcagttgtggatgatttgaaagagaaagggatcaaattagtgatcgtgtcttttacggattatgtgttgcctaatttagcgctcaatgacggctctttagacgcgaattacttccagcaccgcccttatttggatcggtttaatttggacagaaaaatgcaccttgttggtttggccaatatccatgtggagcctttaagattttattctcaaaaaatcacagacattaaaaaccttaaaaaaggctcagtgattgctgtgccaaatgatccggccaatcaaggcagggcgttgattttactccataaacaaggccttatcgctctcaaagacccaagcaatctatacgctacggagtttgatattgtcaaaaatccttacaacatcaaaatcaaacccctagaagctgcggttattgcc

SEQ ID NO: 9531 - DNA (genomic), 366 bp, Helicobacter pylori; double-stranded, circular
  misc_feature (B) LOCATION 1...366
  hypothetical: NO
  anti-sense: NO
ttggatccctttagccataaggagaattttttagccgttgaaacctttaaaatgctaggcaaaacagaaagtaaagacaatcttaattggatgatcgctttgatcattgaaaaagacaaggtctatgagcaagtgggatcggtgcgttttgtggtggttgtagcgagtgctatcatggtgttagccttaatcatagcgatcactcttttaatgcgagcgatcgtgagcaatcgtttggaagtcgtttctagcaccttgtctcatttctttaaattattgaacaatcaakcccattctagcracaytaaattggttraagcgcgatctaatgacgaattagggcgcaygcaaacasctgatyaataa

SEQ ID NO: 9532 - DNA (genomic), 270 bp, Helicobacter pylori; double-stranded, circular
  misc_feature (B) LOCATION 1...270
  hypothetical: NO
  anti-sense: NO
atggaaatacaacaaacacaccgcaaaatcaatcgccctttagtttctctcgttttagcaggagcgttgattagcgccataccgcaagagagtcatgccgcctttttcacgaccgtgatcattccagccattgttgggggtatcgccacaggcactgctgtaggaacggtctcagggcttcttagttggggactcaaacaagccgaagaagcgaataaaaccccagataaacccgataaagtttggcgcattcaagcaggaaaagggctt

SEQ ID NO: 9533 - DNA (genomic), 279 bp, Helicobacter pylori; double-stranded, circular
  misc_feature (B) LOCATION 1...279
  hypothetical: NO
  anti-sense: NO
gtggaagcgcgttattattatggggacacttcatacttttatttgcatgtgggagttttacaagagttcgctcactttggatcgaatgatgtggcgtctttaaacacctttaaaatcaatgccgctcgcagtcctttaagcacctatgcaagagcgatgatgggtggggaattgcaattggctaaagaagtgtttttgaatttgggcgtggtttatttgcacaatttgatttccaacgcaagccatttcgcttccaatttaggaatgaggtatagtttc

SEQ ID NO: 9534 - DNA (genomic), 426 bp, Helicobacter pylori; double-stranded, circular
  misc_feature (B) LOCATION 1...426
  hypothetical: NO
  anti-sense: NO
gtgtatagccgtttttttgccaaccagcatgaatttgactttgaagctcaaggggcgctagggagcgatcaatcaagcttgaatttcaaaagtactctattacaagatttgaatcaaagctataattacttagcctatagcgccacagcaagagcgagttatggttatgacttcgcgttttttaggaacgctttagtgttaaaaccaagcgtgggcgtgagctataaccatttaggttcaaccaactttaaaagcaatagccaatcacaagtggctttaaaaaatggcgcgagcagtcagcatttattcaacgctaacgcaacgtggaagcgcgttattattatggggacacttcatacttttatttgcatgtgggagttttacaagagttcgctcactttggatcgaatgatgtggcgtctttaa

SEQ ID NO: 9535 - DNA (genomic), 264 bp, Helicobacter pylori; double-stranded, circular
  misc_feature (B) LOCATION 1...264
  hypothetical: NO
  anti-sense: NO
atgtttaaaaaaatcatttttttgtgcgtttttttgatagggggatttgtcattccaccccttgaagccatgcctattttgcgcaataaaacccccaaaaaaaattaccaagaagcccatgaaaagctctatagaagcatcattaaccgccaaaasstcacgcgtaaaaaaagcgggtggtattttttagggggggttggcgctgtagaagccattaaggactatcaaggcaaggaaatgaaagattggatgccacgctcaatt

SEQ ID NO: 9536 - DNA (genomic), 240 bp, Helicobacter pylori; double-stranded, circular
  misc_feature (B) LOCATION 1...240
  hypothetical: NO
  anti-sense: NO
atgaaaaaatttttttctcaatctttgttagctcttattatctctatgaatgcggtatctggcatggatggtaatggcgtttttttaggggcgggttatttgcaaggacaggcgcaaatgcatgcggatattaattctcaaaaacaagccaccaacgctacgatcaaaggctttgacgcgctcttggggtatcaatttttctttgaaaaacactttggcttacgcctttatggggttttt

SEQ ID NO: 9537 - DNA (genomic), 30 bp, Helicobacter pylori; double-stranded, circular
  misc_feature (B) LOCATION 1...30
  hypothetical: NO
  anti-sense: NO
atggaacaccttacaaggggaattaagcac

SEQ ID NO: 9538 - DNA (genomic), 381 bp, Helicobacter pylori; double-stranded, circular
  misc_feature (B) LOCATION 1...381
  hypothetical: NO
  anti-sense: NO
gtgttcacttattccttggggcaggttttcttttctctaagtatcggtttagggatcaatatcacttatgctgccgttacggataaaacgcagaatttgcttaaaagcacgatttgggtggttttatcaggrattttaatttctcttgtgrcagggcttatgattttcacttttgtgtttgaatatggggctaatgtctcacaaggcacagggttaatcttcacttctttaccggtggtttttggccaaatgggagcgataggcgttccttgtttcaattcttttcttgctcgcgctcgcttttgctggcatcacttctacggtggctttattagagccaagcgtgatgtatcttaccgaaaagtatcaatactctcgttt

SEQ ID NO: 9539 - DNA (genomic), 381 bp, Helicobacter pylori; double-stranded, circular
  misc_feature (B) LOCATION 1...381
  hypothetical: NO
  anti-sense: NO
atggaaaacagcacactttatattgttattgccggcttatggcttgctgtaggctttggaatctttttaaagaaattagacatgcccgttatcattggctacatttgcacaggaacggtcttagcggctttttttaaaattaatgattttaatttgttgtctgatattggtgaatttggtatcgtctttttaatgtttatgataggcattgagtttaattttgacaagctcaagtccatcaaacaagaagtgctcgtttttgggcttttacaggttgttttatgcgctttaatcgcttttttattggggtattttgttctgggtctttcgcccattttttcccttgttttaggcatggggctttcactctcttcaaccgcc

SEQ ID NO: 9540 - DNA (genomic), 204 bp, Helicobacter pylori; double-stranded, circular
  misc_feature (B) LOCATION 1...204
  hypothetical: NO
  anti-sense: NO
gtggctaaagacatcatcagcgagtctcaaaacctttgcgcaagaaaattccgccgtttgtatgcgttattgaaagaaaatgaaatgctcattcgcatcggatcttatcaaatggggaacgataaagagcttgatgaagcgattaagaaaaaggctctaatggagcaatttttagtgcaagatgaaaacgctttacyagccttt

SEQ ID NO: 9541 - DNA (genomic), 546 bp, Helicobacter pylori; double-stranded, circular
  misc_feature (B) LOCATION 1...546
  hypothetical: NO
  anti-sense: NO
gtggggcttttaaattctaaggcgttcaaaccctaccgcaagattttgcaaatggtgtttcaagacccctacgcatcattaaaccctcgcttaagcattcaaagcattttaatagaagctttgcgctttgcttaccctaaagcttcacaacaagaatggcaccatttagctgaactttgcttagaagaagtgtgtttaaaccctgaattgcttaacttttacgcttatgagctcagcggaggggagcgccaaagagtggcgatcgctagagcgattgccttaaaacctagaatcattcttttagatgagccaacctctgctttagacaaaagcattcaaaaaagcgtgttggaattattgttgaatttacaagaaaagcaggatttgagctatttgtttatcagccatgatttagatgtgatcaaagctttttgcgatagggtgttagtggtgagtgaggggaaaatcgtggaaacaggcgctattgaagaggtgtttgacaaccccaaacacgcttataccaagcgtttgttggaatccaggctt

SEQ ID NO: 9542 - DNA (genomic), 864 bp, Helicobacter pylori; double-stranded, circular
  misc_feature (B) LOCATION 1...864
  hypothetical: NO
  anti-sense: NO
atggccgccaaatccaaagcgyaaacgcttaaagtcttttcaaaatttttcagcaatttcaaaatcactaaactcaaagacaaccacgaagaagcccacaaactttttggagaaaatagccgtaaagcccatgacactgagatcatttactccactttgcaagtggtccccaggtattcaatagaaaccgtgggctttagtttgttgattttagcggtcgcttacatcttattcaaatacggcgaagctagaatggtactccctaccatttctatgtatgccctagcgctttatcgcatactcccttctgtaactggagtgatcagctattataatgaaatcgcttacaaccagcttgcaaccaatgttgtttttaaaagcctttctaagaccatcgttgaagaggatttagtccctttagactttaatgaaaaaatcactctccaaaacatttcattcgcttataagtcaaaacacccggttttaaaaaatttcaacctcaccattcaaaaaggtcaaaaaatcgctctcataggccatagcgggtgcggaaaatccacgctggcggatattattatggggcttacctaccctaaaagtggggaaatttttattgataacacccttttaaccagcgaaaacaggcgctcatggcgtaaaaaaataggctatatcccccaaaatatttacctttttgatggcactgtgggggataatatcgcttttgggagtgctatagatgaaaaacgcttgattaaggtgtgcaaaatggctcatatctatgattttttatgcgagcatgagggccttaaaacccaagtgggcgaaggggcgctaagcttagcggcggtcaaaaacagcgca

SEQ ID NO: 9543 - DNA (genomic), 294 bp, Helicobacter pylori; double-stranded, circular
  misc_feature (B) LOCATION 1...294
  hypothetical: NO
  anti-sense: NO
gtgtgttttatattgcctttttgtttaggggttttaggcacgcaaatctttaaacaagagaccccaagacagctccctatcgtggtggtggatttggataagaccactacaagccatcaagtggcgtttgaattaggcgcaacgagtgcggttgaaatcaaataccaagtgactagcctttcagaagctaaacgctttttaaactccgctgaagtgtatggggcgttaattttgcctaaggatttggagagaaaaatcaaaatggggcgaaaagtggsatttgcccttttatta

SEQ ID NO: 9544 - DNA (genomic), 276 bp, Helicobacter pylori; double-stranded, circular
  misc_feature (B) LOCATION 1...276
  hypothetical: NO
  anti-sense: NO
atgttcgattcaatcgtttattttttcaataagagcgggtttgttaccacgcttgttttagtttggatttcgctttatttggtgatgactttatgggtctttttgtataaaagcattgtattaaagattgaactcaggcgcgagatgcaatctttgtctaacattcttaatggagcgcaagacgctccagagcattttatgtttaataaaaaaagaaatgatgagaccaaaaggtattctaatgaattgttgcaggscttggaaacaccaggttct

SEQ ID NO: 9545 - DNA (genomic), 450 bp, Helicobacter pylori; double-stranded, circular
  misc_feature (B) LOCATION 1...450
  hypothetical: NO
  anti-sense: NO
atggaattttatcaagtctatgacccattaggccatatttggctgagcgctttagtcgcactttcgcctattgcgctcttttttatctctcttattgtctttaaacttaaagggtatagcgctgggtttttaagcttagcgctttcaatccttattgcgttatttgtgtataaaatgcctgttcaaatggtgagcgcgagttttttctatggctttctttatggcttgtggccgatcgcatggattgtgatcgctgcgatttttctttacaacctttcagtgaagtccgggtattttgagattttaaaagaaagcattttaagcttgacgccggatcatcgcattttagtgattttgatcgggttttgttttggctcgtttttagmmggcgcgrttggttttggaggcccggtagcratcacagcggcgattttagtggccttgggctaa

SEQ ID NO: 9546 - DNA (genomic), 219 bp, Helicobacter pylori; double-stranded, circular
  misc_feature (B) LOCATION 1...219
  hypothetical: NO
  anti-sense: NO
gtgggcattattagggggattatccacaggccagaactcattttattagatgagccttttagcgctttagatagtttgaatcgtaagaatttacaggatctcatcaaagaaatacaccaaaattcttgcgctactttcattatggtaacgcatgatgaaaacgaggcgcaaaagttagccacaaaaaccctagaaatcaaagcccttaaacaagagcag

SEQ ID NO: 9547 - DNA (genomic), 573 bp, Helicobacter pylori; double-stranded, circular
  misc_feature (B) LOCATION 1...573
  hypothetical: NO
  anti-sense: NO
atgggcttgatgggcgtgtcgcaaggcttaccaaacaccactagcaagtttggtattgaatttgactctttagctgatgtggtcgcttttggagtcgccccaagccttattacttacttttatgtggggtataactttgggcgtataggcatggcggtgagcgcgttgtttgtgatttttggagcgatacgattagcgcgattcaatatcagcaccaacacaagcgatccctattctttcatcggtatccccattcctgcggcggcggtattggtggtgctttgcgtgttattagataataaataccatttcttagaaggcaataccgaaaagttatttttaggctttattgtcttattaggggtgcttatggtgagcaatatccgctaccctaattttaaaaaagtcaagtggaatctcaagcttttcatcttagtgttgatctttttatcgttagtgtttgtgcgccctttagaggctttgagcgtgtttatggggttgtatttgatctatggcatcattcggtggatctttttaatggtaaaaattacttttaataaaaataaaagcgca

SEQ ID NO: 9548 - DNA (genomic), 330 bp, Helicobacter pylori; double-stranded, circular
  misc_feature (B) LOCATION 1...330
  hypothetical: NO
  anti-sense: NO
atgagcgtgaatttattggaattgttaaaactcgctgtgcctttagcggttattttgagcgttcaagtggcggttatgatcctttatgtggtgcttgtaacctttagggtatgcgggaaggattatgatgcggcggtgttgtgcgcggggcattgcggttttgggcttggagcgaccccaacggctatggtgaatatgcaaaccatcaccaaccactatgggccatcgcatgtggcgtttatcgtcgtgcctttagtgggagcgttttttgttgatattattaacgctttagcgattaaaggctttttgcttttgccttttttccctagt

SEQ ID NO: 9549 - DNA (genomic), 459 bp, Helicobacter pylori; double-stranded, circular
  misc_feature (B) LOCATION 1...459
  hypothetical: NO
  anti-sense: NO
atgcagaatttgccgggtatggcgagagcggcgatgctaaccacatcatcagccccagcccctgagggtgaaggggcttttagagccatgaaaatggcttcagaaatggcgaaagtggaagtaggctatgtgaacgcccatgggacaagcacgcattataacgattggtatgaaagcattgcgttaaaaaatgtgttggctctaaagaaaaagtccctcctgttagctccactaaagggcagattgggcttgcttgggtgctgcggggttagaagccgttattctatcatggccatgaaycaagggatcttacctcctaccattaatcaagaaacgcctgacccagaatgcgayctggattatatccctaatacagccagagaaaagcaagtgaatgcggtgatgagtaactcatttggttttggtggcactaatggtgttgtgattttcaaaaaagcc

SEQ ID NO: 9550 - DNA (genomic), 597 bp, Helicobacter pylori; double-stranded, circular
  misc_feature (B) LOCATION 1...597
  hypothetical: NO
  anti-sense: NO
atgaaagaatctttttacatagagggaatgacttgcacggcgtgttctagcgggattgaacgctctttaggacgtaaaagttttgtgaaaaaaatagaagtgagccttttaaataagagcgctaacattgaatttaacgaaaatgaaaccaatttagacgaaatttttaaactcattgaaaaactgggttatagccctaaaaaaactctagcagaagaaaaaaaagaattttttagccctaatgttaaattagcgttggcggttattttcacgctttttgtggtgtatctttctatgggggcgatgcttagccctagccttttacctgaaagcttgcttacgattaaccatcatagtaattttttaaacgcttgcttacagcttataggcgcgctcattgtcatgcatttggggagggatttttacattcaagggtttaaagccttatggcacagacaacccaacatgagcagccttatcgccataggcacaagtgctgccttaatttcagcctgtggcaattgtatttggtttataccaatcattataccgatcagtggtcttatgggcattattattttgaaagcgtgtgcgtga

SEQ ID NO: 9551 - DNA (genomic), 225 bp, Helicobacter pylori; double-stranded, circular
  misc_feature (B) LOCATION 1...225
  hypothetical: NO
  anti-sense: NO
gtggggagtttgaaatttttaaacgctatgggggttgatttaaaggttaaagagagcgctaatatcatggtaggctttgcgaaaaataagaccttatgcgcgttattcattttagaagagcgtttgaaagctaacgctaaagaagtcattcaggctttacaaaatcaaggcttggaattagaaattttaagcggggataatgaaagctcggttaaggagtgcgcg

SEQ ID NO: 9552 - DNA (genomic), 237 bp, Helicobacter pylori; double-stranded, circular
  misc_feature (B) LOCATION 1...237
  hypothetical: NO
  anti-sense: NO
gtgaacgtgggcgtgccttttagctatcaagtgagcgcgacctttcaaaactcacgcctttctagtttgctagaaactttaaaaaagagttttttagaaaagcccttaattgagagcagcgcgaataaaatcgcggatattttttctaaagcggtgttgtttttagcctttgtgagctttttattgtggcaatttggtttggggggtaattttgaaaaasgctttaatggtgtgtat

SEQ ID NO: 9553 - DNA (genomic), 201 bp, Helicobacter pylori; double-stranded, circular
  misc_feature (B) LOCATION 1...201
  hypothetical: NO
  anti-sense: NO
atgatcgctgtattaccgcccttgttttctatggggagctttgatgagtggatttatagggggcttgtggctttaatggtgagctgtccttgcgcgttagtgatttctgtgcctttagggtattttggaggcgtgggagcggcgagccgaaaggggattttaatgaaaggagtgcatgttttagagggtgcttacccaaac

SEQ ID NO: 9554 - DNA (genomic), 246 bp, Helicobacter pylori; double-stranded, circular
  misc_feature (B) LOCATION 1...246
  hypothetical: NO
  anti-sense: NO
ttgagcaagcaaagcgcggacattgtgatcactaatgactccttaagctctttagtcaaagttttagcgatcgctaaaaaaactaaaagcattacttggcaaaatatcttgttcgctttggggattaaggcggtttttatcgtgctagggcttatgggggtagcgagcttgtgggaagcggtctttggcgatgtgggggttacgcttttagcyttagccaattccatkcgcacgatgagggcttaa

SEQ ID NO: 9555 - DNA (genomic), 153 bp, Helicobacter pylori; double-stranded, circular
  misc_feature (B) LOCATION 1...153
  hypothetical: NO
  anti-sense: NO
gtggttatcttaggctcrcatggcaaggaagagtattacgctagcaagattgcagcccccatttttaaagaaatcaccgaaattttagtgcgttacaattacctatcgccctctattgcgattcaaaacgctttggaaaaaaaccgcttaaaa

SEQ ID NO: 9556 - DNA (genomic), 282 bp, Helicobacter pylori; double-stranded, circular
  misc_feature (B) LOCATION 1...282
  hypothetical: NO
  anti-sense: NO
ttgtatccgccgggatctgtggttaaaatgggcgtggggttaagctttttagaaaaccttcatatcacagaaaacaccactatccccacaccgccttttattgaagtgggcaagcgcaaattcagggactggaaaaaaacagggcatggcaattctaatttgtataaagccattagggagtccgtggatgtgtatttttataagtttgggcttgaaatctctatagaaaamctctctaaamcctttaaggraagtggrctttggggaaaaaacggrcgttga

SEQ ID NO: 9557 - DNA (genomic), 330 bp, Helicobacter pylori; double-stranded, circular
  misc_feature (B) LOCATION 1...330
  hypothetical: NO
  anti-sense: NO
gtggaaaaaatcaaaccctatgcccctaaagatagccctttaatagactattctagcctagttagaaacgtccaatccactttaaaaggcacttcttttgaaacgcttatcaatggcgtttgggaaagctttgaaacgaaggttttaggggagtttaacgcctataatatcgcttcagcgattttaaccgctaagcatttaggcttagagacagaaaggatcaaacggcttgtttttgagcttaagcctattaaccatcgtttgcaactgttggaagcgaatcaaaaaatcattatagacgatasctttaatgggaatttaaagggcatg

SEQ ID NO: 9558 - DNA (genomic), 417 bp, Helicobacter pylori; double-stranded, circular
  misc_feature (B) LOCATION 1...417
  hypothetical: NO
  anti-sense: NO
atggcattagacaaaaggatttggatgcaytttgatcttttgccttttgtgtttatcatccccttgttggtggtttcttttttgttgatttttgagagtagtgcggttttgagcttgaagcaaggggtttattatgccatagggtttcttctcttttgggtagtgttttttatccctttcaggaaactcgatcggtggctctttgcgctttattgggcgtgcgttattttattagcgttagtggattttatgggatcgagcaagcttggagcgcagcgatggctagtcattcctttcacttctatcaccttacagcctagcgagcctgtgaaaaatcgcyattcytttattgttggcgcatttgakyaaaatyaacccgaccyccttttaagggctatgattggggcatgtttttaa

SEQ ID NO: 9559 - DNA (genomic), 1341 bp, Helicobacter pylori; double-stranded, circular
  misc_feature (B) LOCATION 1...1341
  hypothetical: NO
  anti-sense: NO
atgctaaaaaagattttttatggttttatcgttttatttttgattatcgtagggttgttggccgttcttgtcgctcaagtttgggtaactacggataaggatattgctaaaattaaagattatcgccccagtgtcgcttcacagattttagacagaaaagggcgtttgatcgctaatatttatgataaggaatttcgtttttatgcgcgttttgaagaaatccccccacgatttgttgaaagccttctagcggtagaagacaccctcttttttgagcatggggggatcaatttagacgctgtcatgcgcgctatgattaaaaacgctaaaagtggtcgttacactgaagggggtagcactctaacccaacaactcgttaaaaacatggtgctcacacgggaaaaaaccctaaccagaaaactcaaagaagctatcatctccatacgcattgaaaaagtcttaagcaaagaagaaattttagagcgttatttgaaccaaactttttttgggcatgggtattatggcgtgaaaaccgcaagtttagggtattttaaaaaaccccttgacaaactcacgcttaaagaaatcaccatgttagtcgccttacctagggctccaagtttttatgaccctaccaaaaatttagaattttcactctctagggctaatgatattttaaggcggttgtattctttaggcyggatttcttctaacgagctcaaatccgctctcaatgaagtgccaatcgtctataaccaaacttccacgcaaaatatcgctccctatgtcgtggatgaagtgttgaagcaattggatcaattagacgggttaaaaactcaaggctataccataaaactcacgatagatttggattaccaacgcttagcgttggagtctttgcgttttgggcatcaaaaaatcttagaaaaaatcgctaaagagaagccaaaaactaacgcttctaatgataaagatgaagacaacttaaacgccagcatgatagttacagaaacgagcaccggtaagattttagccttagtgggggggattgattataaaaaaagcgctttcaatcgcgccacgcaagccaaacggcagtttgggagcgcratcaagccttttgtgtatcaaatcgcttttgataatggctattccaccacttccaaaatccctgataccgcgcgaaattttgaaaatggcaattatagtaaaaacagcgtgcaaaaccacgcatggcaccctagcaattatrctcgcaaatttttagggcttgtaaccttgcaagaagccttgagccattcgttaaatctggctacgattaatttagcgatcgcttggcta

SEQ ID NO: 9560 - DNA (genomic), 228 bp, Helicobacter pylori; double-stranded, circular
  misc_feature (B) LOCATION 1...228
  hypothetical: NO
  anti-sense: NO
atgaaaaaaacaaccctctttgtattgggcttattattcaatagctctttaagcgctgttgatgggatttctcaaaccgagccttcttctttgaatttggctgaagatagcctgcctttgaaccattctaacgcccaaaaactctctttaaaaaacgcatggaatagggtgttgtctaatcatgaaggcttgcatgcgcagaatacgccattaagcgagcgagtaaaa

SEQ ID NO: 9561 - DNA (genomic), 393 bp, Helicobacter pylori; double-stranded, circular
  misc_feature (B) LOCATION 1...393
  hypothetical: NO
  anti-sense: NO
gtgcatgacggcgtgcttgggtgggtaggcttcactttgattgcgagcatgtatcacatgacccctaggcttttcaaaagagagatctattcaggaagacttgtggatttccaattttggatcatgactttagggattgtgctttacttttcgtccatgtggattgcagggatcacgcaagggatgatgtggagggatgtggatcaatacgggaatctcacttaccaattcattgacacggttaaggcgctaatcccttattacaatattagaggcgttgggggtcttatgtattttattggatttattatttttgcttacaatatctttatgacaatcacggcaggcaaaaaattagagcgtgagcccaattacgccacscctatggcarra

SEQ ID NO: 9562 - DNA (genomic), 882 bp, Helicobacter pylori; double-stranded, circular
  misc_feature (B) LOCATION 1...882
  hypothetical: NO
  anti-sense: NO
ttgttgctttttatcgttgtgatcacctctttggttaaaaacacgatcccaaatatttggctcactaaaatcctttatatggctatcttgctttgcgcgatcgctcattctgtggggcyaatcttgcgytggtatgtgagtgggcattcgccttggagtaacgcttatgagtccatgttctatatcgcatgggcttctgttatcgcagggtttgttttacgamctaaactcgcgctatcggcttctagctttttggccggtatcgcgctctttgtggctcatttaggctttatggaccctcaaattggccctttagtgccggtgttaaaatcctattggctcaatatccatgtctctgtcatcaccgctagttatggctttttgggcttgtgttttgtgctagggattttaagtttggttttgtttattttgcgcaaacaagggcgtttcaatttagacaaaaccattctttccattagcgctatcaatgaaatgagcatgattttaggcctgttcatgctcacagccgggaatttcttaggtggggtgtgggcgaatgaatcttgggggcgctattgggggtgggaccctaaagaaacttgggcgttgatttctatttgcgtctatgccttgatcttgcatttgcgttttttaggctctcaaaattggccctttattttagcgagcagcagcgtgctagggttttattcggttttaatgactttattttggcgtgaattactacctttctggcttgcacagctatgccgcaggksatcstttgccgatccctacttttttatactttttggtagcgatacctttcgctctcgtatcttggcgtatttcaaacgtcatttgagtttgcctaaattggtttaa

SEQ ID NO: 9563 - DNA (genomic), 711 bp, Helicobacter pylori; double-stranded, circular
  misc_feature (B) LOCATION 1...711
  hypothetical: NO
  anti-sense: NO
gtgtttyccatgctggtgttggtgttgagcgataattttttagggcttttcattggctgggaaggggtggggctatgctcttacttgctcattggcttttggtatcataaaaaaagcgcgaataacgcttctattgaagcctttgtgatgaatcgaatcacggatttaggcatgctcatggggattattttgatcttttggaattttggcaccctccagtataaagaagtctttagcatgctcaataacgccgattattccatgctcttttacattagcgtgtttctttttattggcgctatggggaagagtgctcaattccctatgcacacatggttagccaacgctatggaggggcctacccctgtatccgctctcatccatgcarcgacgatggtaaccgctggggtgtatctaatcatcagagccaatcctttgtatagtgcggtgtttgaagtgggttattttatcgcatgcttaggagcgtttgtggctctttttggagcgagcatggctttagtcaataaggatttaaaacgcatcgtggsytattccacgctttctcaattagggctatatgtttgtagcggccgggcttggggcttatgcgatcgcgcttttccacctctttacgcatgcgttcttcaaatccctccttttcttaggctcaggcaatgtcatgcatgcgatggaagacaatctggatattac

SEQ ID NO: 9564 - DNA (genomic), 195 bp, Helicobacter pylori; double-stranded, circular
  misc_feature (B) LOCATION 1...195
  hypothetical: NO
  anti-sense: NO
atgttgcgtttattagcccaaaaaagcgctattaaactcattcttatccccccaagcgcgaacgctttaggcatcgcttctatttgcgaattgagcgaagaagtttttgaacatgaaaaaatcgtaggcattcgcgctcaaggggatttcactatcaatagcgacgataggggtttttgggaaagacgctgtcag

SEQ ID NO: 9565 - DNA (genomic), 372 bp, Helicobacter pylori; double-stranded, circular
  misc_feature (B) LOCATION 1...372
  hypothetical: NO
  anti-sense: NO
gtgatggctttgttgaaaattagtgtggtagttcctgagggggaagtttatacaggagaggttaaaagcgttgtgttgccaggagtggaaggggaatttggggtgctttatgggcatagcaacatgatcaccttgcttcaggcgggagtggttgagattgaaaccgaaaaccaaaaagagcacattgctatcaattggggttatgcagaagttactaatgaacgggtggatattttagccgatggagcggtctttattaaaaaaggatcagatgacagagatgatgctatctctagggctaaaaagcttttagaggacgcaagctctgacaggttagcggtctctagcgtgctggctaagattgagtctctt

SEQ ID NO: 9566 - DNA (genomic), 486 bp, Helicobacter pylori; double-stranded, circular
  misc_feature (B) LOCATION 1...486
  hypothetical: NO
  anti-sense: NO
atgggatcttacacattccctctcattttgaagccaatatttataaacaaagtgcctgtaacgatagatttttatgcgaacgccaattactttttgatttatggtgcgttagcgaatgcggtggtggggagcatcaacgccttaaacgatgaaatcaggttcaaacgcaacgcccaaatagaagaagctgaattagggacagacgggattaagattaagcctatcgctttgtataaccctagtgaggggtatttgaattacgcgctctctagcgtgtttattttcatcttacaccaggtgatgctcattgcaagcagcatgtttactagctccaggcgtttggaattggcccttttagacaagaaacaaatcgctttaaggctgtgcgcaagactcttggtgttcatgggggcgtttagcgtttttgttttatggtattttggggcgctgttttctttttatgggatcgaacggcatggaagcgct

SEQ ID NO: 9567 - DNA (genomic), 255 bp, Helicobacter pylori; double-stranded, circular
  misc_feature (B) LOCATION 1...255
  hypothetical: NO
  anti-sense: NO
atgagawaggagaaaataatgacgaattttgaaaagrttatcgcgcaaaacaggctcaaaacgaacgcggttttaaccacttactgcgcgatttttgcttttattgggttgttggtggatgctattagaatcaacgctaatgatttaggtatagccctttttaaactcatgacttttcaaatttttcctacgrttactattgtcatgtttgtggtggcttttgtcattakkckkagtttgtatccaaaattttag

SEQ ID NO: 9568 - DNA (genomic), 939 bp, Helicobacter pylori; double-stranded, circular
  misc_feature (B) LOCATION 1...939
  hypothetical: NO
  anti-sense: NO
gtgcaaccgatgaaatctaaaaaactttatttagctttaatcataggggttttattagcgtttttaaccctatcttcatggctaggtaatagcggtttagtggggcgttttggggtgtggtttgccgcaatcaataaaaaatattttgggtatctttcattgattaatttaccctatttggcgtgggttttattccttttatacagggctaaaaacccttttacagaaatcgttttagaaaaaactttagggcatctattaggcattttatctttactctttttgcaatctagcctgttgaatcaaggggaaatcggcaacagcgcgcgtttgtttttacacccttttataggggactttgggctttatgtgctgataatgcttatggtagttatctcttatttaattttattcaaactgccccctaaaagcgttttttacccttatatgaacaaaacacaaagccttttaaaagagatttacaaacaatgcttgcaggcctttagccctaattttagcctgaaaaaagagggttttgaaaacaccccatcagattctcaaaaaaaagaaaccaacaacgacaaagaaaaagaaaacctcaaagaaaaccctattgatgaaaaccacaacacccctaacgaagaatcgtttttagcgatccctaccccctataacacgaccttaaataattcagagccgcaagaaggcttagtccaaatttccccacacccccctacccattacaccatttaccctaaaagaaaccgatttgatgatttgactaaccccactttaaaagaacctaagcaagaaaccaaagaaagagaacccacgctaaaaaaagaaacgcccaccacactcaaacctatcatgcccatatccgcatccacacagaaaatcatgacaaaacrgaaaaccacaaaacccctaaccacccca

SEQ ID NO: 9569 - DNA (genomic), 174 bp, Helicobacter pylori; double-stranded, circular
  misc_feature (B) LOCATION 1...174
  hypothetical: NO
  anti-sense: NO
gtgattatgactaagcttgatggcacttctaagggcggagcgattttargcgtgctgtatgagttgaaattacccattctttatttaggaatgggcgaaaaagaagacgatttgatcgcttttgatgaagaacgctttatagaagatttggttgatgcggtgtttgtggaacaa

SEQ ID NO: 9570 - DNA (genomic), 576 bp, Helicobacter pylori; double-stranded, circular
  misc_feature (B) LOCATION 1...576
  hypothetical: NO
  anti-sense: NO
atgatggataaggtgggttttaaatctcaaggcatctttgtgatggacgctagcaagagggatgggcgtttgaacgcgtattttggaggcttgggtaaaaacaagcgggtggtgttgtttgacactttgatctctaaagttgggacagaasggcttttagccattttagggcatgagttagggcattttaaaaataaggatttgttgaaaaatttagggattatgggaggcttgctcgctcttgtttttgctttgatcgctcatttgccgccgttggtttttgaaggctttaatgtctcgcaaacgccagcgagtttgatcacgattctactcttgtttttgccggtgttttccttttacgccatgcctttgattgggttttttagccgcaagaacgaatacaatgcggacaagtttggggcgagtttaagctctaaagagactttagccaaagcgttagtgtccattgtgaatgaaaataaagcgttcccctattcgcaccctttttatgttttcttgcatttcacgcacccgccgctattagaacgcctaaaagctttggattatgaaattgaa

SEQ ID NO: 9571 - DNA (genomic), 261 bp, Helicobacter pylori; double-stranded, circular
  misc_feature (B) LOCATION 1...261
  hypothetical: NO
  anti-sense: NO
gtgtatgcgctcatggtggcgttttttgcttacatgagttattgcttggggtatcaattctccaaattcgtttctaaaaacaacatttcatcgctctcatcgcttttatcaagctgtgtgcgcgtggtctctgtgctaatcttgtcgctcagtagcctagagttgcgttacttctcacccctaactatcataaccatgcattttgccctaacgcttatcatcctctttttctttttgtataaggctaagccgtttgatgag

SEQ ID NO: 9572 - DNA (genomic), 603 bp, Helicobacter pylori; double-stranded, circular
  misc_feature (B) LOCATION 1...603
  hypothetical: NO
  anti-sense: NO
atgaatatttatcaaaaaaacttgcaagctcttttcaaaaaagaccctcttttgttcgcaaagctcaaagccattaaagaaaacaaaaaatacgaagtgtttttagggaatgatagcgcgaatttcaacctcttagataaagaaacaaacacgcccttatttgaaaaaagcccgctagattcaagcttagagctatataaaaatagcgaaattcacatgctctatccttatttgtattattttggcttgggtaatggggtgttttatcgcttgcttttaggcaatgaaaatttaaaacgcttggtggtcattgagcctgaaatagaggtgattttcattgtgctgaatcttttggatttttccactgagattttagaaaatcgtttgattttattgcatgcaagtttttgcaattacaacatgattgcttcattatttgatatggataaaaagtctcgtttatacgcaagaatgtatgatttaaaactttttaacgcttattatgaacgatactctcatcaaatgatagaaatcaaccagcatttcacgcgcgctttagagcatggcgctattagcgtaggcaatgacgctaaagcgcactca

SEQ ID NO: 9573 - DNA (genomic), 423 bp, Helicobacter pylori; double-stranded, circular
  misc_feature (B) LOCATION 1...423
  hypothetical: NO
  anti-sense: NO
atgtggccgtraaagctttttctaaaacccctaaaagaaacgagccttgcccttgtgggagtggcaaaaaatataaagattgttgcgctaaaagcgggcctaaaaagggcttatttgccaaatagatccttaatctttttccttatcaagcgttatttgcgttttgataaaagccagcctttcattagtatcactgctttgttagccttttttggcgtggcggttggcgtgatggttttaattgtggctatggcgatcatgaacggcatgagtaaggaatttgaaaaaaagctttttgtgatgaactaccccttaacgctctataccacaagcccttatgggatcagcgaagaagtggttcaagctttagaaaaaaagttccctaatttgcctttttcagyccctatttgcaaacccaaagcc

SEQ ID NO: 9574 - DNA (genomic), 381 bp, Helicobacter pylori; double-stranded, circular
  misc_feature (B) LOCATION 1...381
  hypothetical: NO
  anti-sense: NO
gtgcttctcctttctcgtatgggtatcgcttttgcccactctattttttggtccatcacggcttctttagtcattcgtgtcgcgccaagaaacaaaaaacaacaggccttagggctgttagcgttagggagttcgttagcgatgattttagggttgccgcttgggaggatcattgggcaaattttggattggcgatccacttttggcgtgattgggggcgttgcgactcttataatgctgcttatgtggaaattgctcccgcatctaccgagtagaaacgccggcacgctcgcaagtgttcctatattaatgaaacgcccgcttttagtggggatttatttgcytgtgaatcatggttatttctgggcatttcaccactta

SEQ ID NO: 9575 - DNA (genomic), 414 bp, Helicobacter pylori; double-stranded, circular
  misc_feature (B) LOCATION 1...414
  hypothetical: NO
  anti-sense: NO
ttgtggcgcacaccgaagacrcccttagtcattaaaccctatttgaaaagcatgagcgattcagagatytttgcggycaygtgcgtgggyatggcyagcgttrcggggcctgtgttagccgggtatgcgagcatgggcattcctttaccttatttaatcgccgcatcgtttatgtccgctcctggggggttgctgttcgctaaaaccatttacccgcaaaacgaaaccatttctagccatgcagatgtttctgcagaagagcatgtcaatattatagaagctaycgcwmatggggcaagcacaggggytcatttagccttgcatgtgggggcgatgcttttagcctttgtggggatggtcgcgctcgttaacgggcttttaggggttgtagggggatttttaggcatggagcat

SEQ ID NO: 9576 - DNA (genomic), 777 bp, Helicobacter pylori; double-stranded, circular
  misc_feature (B) LOCATION 1...777
  hypothetical: NO
  anti-sense: NO
atgattttagcccttttgatttctaaagaaaaaacgcatttagaagcgttgtattatttgagctatggcgtgcttttagggggcgtggctcaaatcttattacacttttatcctttagtaaaattaggcttatgggatttattatttaaagggttgttgggttttaagactaaaaatacaaacaaaaaagaatatcgtttgaatagggctaaaaaggatctaaaagcgtttttcaagcaattcttccccagcgtcttaggcaattctagcgctcagatcgcttcttttttagacaccacaatcgcttcttttctggcgagcgggagcgtgtcttatttgtattacgccaatagagtcttccagctccctttagccttattcgctatcgctatctccacagctcttttccctagcattgcgatcgcgcttaaaaacaaccagcaggatttaatcttacaacgcttgcaaaaggcgtggttttttttggtgggggttttgcttctttgcagcattggggggataatgttaagcaaagaaatcaccgaacttttatttgaaagggggcaatttagccctaaagacaccctaatcacttcgcaagtcttttcgctctatcttttaggcttgctcccttttgggctaaccaaactcttttctttatggctttatgcgaaattagagcaaaaaaaagcggctaaaatctctttaatttcgctttttttaggtttagcggcttctttgagtttaatgcctttgttaggggttttgggtttgcgt

SEQ ID NO: 9577 - DNA (genomic), 282 bp, Helicobacter pylori; double-stranded, circular
  misc_feature (B) LOCATION 1...282
  hypothetical: NO
  anti-sense: NO
gtgcttataagcgtgatgataggccaaaatcaagtcttaggctttatagggactaatttcaagcaagaattagtcgtggatttcattgtcccaagcgctgaaatcaacataggcrrtcaagtgytaacgagcgggctagatgggatttttggagcgggggtgtttgtgggtgaagtttcaagcgttgaagatcattacacttataaaagcgcggtgttgaaaaacgcttttttaagcgaagccaaacttttaaggcatgtgtttttaagcggtgtgaaaaac

SEQ ID NO: 9578 - DNA (genomic), 237 bp, Helicobacter pylori; double-stranded, circular
  misc_feature (B) LOCATION 1...237
  hypothetical: NO
  anti-sense: NO
gtgatggtttataaactccccaaacaccagcaaaataaggtcatgattttaggcttgggcttagcgatgatcactcgtatagggcttttagggagcttgtttttcatcagccatttgcaaaagcctttattcgctatagcgggcatgagcttttcatggcgtgatgtggtgctgcttttagggggggcgtttttggcttttaaggcgttagtggaattaaaaagagcagatctatcc

SEQ ID NO: 9579 - DNA (genomic), 573 bp, Helicobacter pylori; double-stranded, circular
  misc_feature (B) LOCATION 1...573
  hypothetical: NO
  anti-sense: NO
atgaaaaatccccaagctaatgttttaaaactctttttaaatcaagtggctgaccaaaaatacatagatatgaatgatgaaaaaaactatgacccaagagaacctgaacccccttatggaacaaaaggggcgttagatgagattataaggacagatgctaggagttgggcaaacactcctgatgatgaatttgggagcattatgtcttcttttaagcgttttatgtatgtctataaagacccaaaagtgcgtgaagctacttctaaaatgagctttgattatgaagaattaagaacgggcaatatcagtatttacattgtaatcgctcaaattgatataggcacactttcttctttagtaagagcctttttagagagtattgctaaaaaccttatggtcaaagaaagctctaaacctgaagagcgtatttttatcattgctgatgaatttgttagatttggtaagttgcctttcttgttagaaatgccagcactttgtcgctcttataatgttgtccccttattcatcacgcaagattatgctatgattagaaatactatagcgatgatgatt

SEQ ID NO: 9580 - DNA (genomic), 219 bp, Helicobacter pylori; double-stranded, circular
  misc_feature (B) LOCATION 1...219
  hypothetical: NO
  anti-sense: NO
gtggggggcttagccatgctgggctttttttataatattgaaaaaatttcgctcgccacagcgacggctttctcgcaatgcgcgcctawttatacggtgctcctttcccctttgcttttgaaagaaaagctcaaaagaagcgcgttaatttccgcatgcatcgggctagtgggggtggtgttgatttcagatcctagcgtggaaaatgtaggacctagt

SEQ ID NO: 9581 - DNA (genomic), 333 bp, Helicobacter pylori; double-stranded, circular
  misc_feature (B) LOCATION 1...333
  hypothetical: NO
  anti-sense: NO
atggccgggcttgttttgatggtgctgctcgccagttatgaaagctttgtttctaaattagacaaggtggatgctagcgaaatcacttggctaaaacacacagattttaacgctttaaaattaaaggtttccctctccattgtagccatttcggcgattttcttgctcaaacgctacatgagtttagaagacgttttatccagtattcctaaagacacgcccctatcgcataaccctattttttggcaagtggtgatccatttggtgtttgtgtgttcagcgctgttaaccgctgttaccaataacatcgctttttcgcagaaagaaaggcat

SEQ ID NO: 9582 - DNA (genomic), 273 bp, Helicobacter pylori; double-stranded, circular
  misc_feature (B) LOCATION 1...273
  hypothetical: NO
  anti-sense: NO
atggttaaacactatcttttcatggcggtttcgcaggtctttttctccttctttttagtgctgttttttatctcttccattgtgttattaatcagtattgcaagcgtaacgctcgtgattaaagtgagctttttggatctggtgcaactctttttgtattccttgccwggaaccattttttttattttgccgatyactttttttgcggcttkgcgyttggggstttcaaggcttagctatgaccatgaattgttagtgttttttctcytttag

SEQ ID NO: 9583 - DNA (genomic), 405 bp, Helicobacter pylori; double-stranded, circular
  misc_feature (B) LOCATION 1...405
  hypothetical: NO
  anti-sense: NO
gtggtggctgatgaagttaggaatttagctgggcgcactcaaaagtctttagccgaaatcaattccactatcatggtgattgtccaagaaatcaatgatgtgagttcgcaaatgaatctcaattcgcaaaaaatggagcgcttgagcgatatgagtaaaagcgtgcaagaaacttacgaaaaaatgagttctaatttaagctcagtcgttttagacagcaatcaaagcatggacgattacgctaaatccggacaccaaattgaagctatggtaagcgattttgcagaagtggaaaaagtggcttctaagactttggctgattcttcagatattttaaacatcgctacgcatgtgagtggaacgaccatgaatttakacaaacaagtgaatttgtttaaaacttaa

SEQ ID NO: 9584 - DNA (genomic), 609 bp, Helicobacter pylori; double-stranded, circular
  misc_feature (B) LOCATION 1...609
  hypothetical: NO
  anti-sense: NO
atgcaagcttgggtggataagccggtattgttagagccagatagtaacgcccaatacgccgctgtcattgaaattgatgtggcagaaatcacggagcctattttggcatgccctaatgaccctgatgacgtcgctactttgagcgaagttttagcggatacgaccggcaaaagaccccacgctattgatgaagtgtttattggctcttgcatgacgaatattgggcatttcagagcctttggtgaaatcgttaaaaacgcccctcccagtcaagcacgcctttgggtagtgccacccagtaaaatggacgaacaagagcttattaatgagggctattatgcgatttttggggctgccggggcaaggactgaagtaccaggctgtagcttgtgcatgggcaatcaagcgagggttagggataatgcggtcgttttttctacttccacacggaattttgataatcgtatgggtagaggggctaaagtgtatttgggcagtgcggagcttggggcggcgtgcgctttactagggaggatccccactaaagaagaatacatgaatttagtgagtgaaaagctagagagccaaaaagacaagatctatcgctmc

SEQ ID NO: 9585 - DNA (genomic), 627 bp, Helicobacter pylori; double-stranded, circular
  misc_feature (B) LOCATION 1...627
  hypothetical: NO
  anti-sense: NO
atgaatgcattgaagcgtgcgtgtttaagattgatgggcgaaaccaataccgatgatttaascccarygagcgacgctttcacacggagcgatattcctttacacgccaaagccatgctaaaaaaccggattgaaaattacgaacaacgcattgaagccattaaaactaaaggcgttcctgtagcgtatgtgggcgatgtggttggcacaggaagctctagaaaaagcgcgactaactctatcatgtggcattttggtaaggacattccttttgtgcctaataaaaggagtggaggcattgtgattgggggggtgatcgctccgattttctttgcgacttgtgaagatagcggggcgttacccattgtggctgatgttaaggatttgaaagagggcgatatcattaaaatctacccttataaaggcgaaatcacgctgaacgataaggtggttagcacctttaagctagagcctgaaactttattagatgaagtcagggcttctgggcgtatccccttaatcattggtaggggtttgaccaataaagcgcgtaaatttttgggccggcgaatcggaagcgttcaaaaaaccttccgcccctcaagcgcgctaaggctacactttgcc

SEQ ID NO: 9586 - DNA (genomic), 162 bp, Helicobacter pylori; double-stranded, circular
  misc_feature (B) LOCATION 1...162
  hypothetical: NO
  anti-sense: NO
atgaataaaccatttttaatcttactcatagccctaattgcctttagcggctgtaacatgagaaaatacttcaaacccgctaaacaccaaattaaagcgaagcgtatttccctaaccatttgcaagaaagcatcgtttcgtctaatcgttatggagccattt

SEQ ID NO: 9587 - DNA (genomic), 387 bp, Helicobacter pylori; double-stranded, circular
  misc_feature (B) LOCATION 1...387
  hypothetical: NO
  anti-sense: NO
gtgatccagtctcaccctaaacaaactctaattgaagatgaaaattatttttatgctaacaagggtctttataaaaccaacaaagaagcctttttaagggtttataaaatcccagagagcatgcccatagaaaaacgagaaagtttaagcaaggtttctaaaatctttttagcgttgctttttttcatttctagcatgctttttgggatcttttggcgtttgcccaaacgattggacactaaaatgagtttagagagcgcgcacaaaaacgaattagaaaatgcattccaacgatacgatgcgctaggggtgcgttttgaagacattgcaggggtgaatgaagtcaaagaagaattactagaagtgatrgattwtttwaaaaaaccc

SEQ ID NO: 9588 - DNA (genomic), 360 bp, Helicobacter pylori; double-stranded, circular
  misc_feature (B) LOCATION 1...360
  hypothetical: NO
  anti-sense: NO
ttggctttaagattgccttttttgatcgctcacgtcatcaacatgtttttattctacctcatagggcgaaagattttaaaaaagcctaaagacgctctttatgtggtattgacttacgctttattgcctggggtgaatctctttgcgattttactggctaaaagcgtgctggtgttaagccttgggcttttgattagctatttgtatattaaaacccaaaaaatcccttatttaacccttagcgcttgcgcgtttttagacggtgcgttcatcccgcttttactaggggtttttgcctacgctttaaggaaaacggctattttaagagcgcgatctttgctttggtggttttamttgtga

SEQ ID NO: 9589 - DNA (genomic), 603 bp, Helicobacter pylori; double-stranded, circular
  misc_feature (B) LOCATION 1...603
  hypothetical: NO
  anti-sense: NO
atgaatacatcaaaaaaattaggtaaccccttgctttttttgcatgataataaaattttgttgtttgtcgtaggggtgagcatgggcgggtgggccacttctaaaatctatcaatttgaaagcgctttagagccgattcattttaagtttgcgcgaaaactctctttaagcccttttttaaatttgagccatttagtaaggaataagcctttaaacaccactgatggcgggtttatgctaccactctatcacgaattagccacccaataccccttgttgttgaaatttgaccaacaaaataacccaagagagcttttaaggcctaataccttaaaccaccagctccaaccaagcttaaccccctttaaagactgcgctgtcatggcgtttagaaaccattcttttaaagatagcctcatgctagaaacctgtaaaacccccactgattggcaaaaacccatttctacaaatcttaaaaacttagatgattctttaaatttactcaatttaaatggaatattgtatttgatccacaaccctagcgatttatcactgcgtcgtaaagaactttggctttctaaattagaaaaccyycaactcrtt

SEQ ID NO: 9590 - DNA (genomic), 576 bp, Helicobacter pylori; double-stranded, circular
  misc_feature (B) LOCATION 1...576
  hypothetical: NO
  anti-sense: NO
atgaaatctacaagaattggttctaaaattgtcatgatggtgtgtgcggttgttattgtcattagcgctgttatgggcgttattatcagctacaaggttgaaagcgtgttgcaaagccaagccacagaattgctgcaaaaaaaagctcagttagtcagttttaaaattcaaggcattatgaagcgcatttttatgggcgctaacacccttgaaaggtttttaagcgatgaaaatggcgctattaatgacaccctaaaaagacgcatgctctctgagtttttgttagcaaaccctcatgtgttattggttagcgcgatttatacgaataataatgaacgaatgatcactgcaatgaacatggattcaaaaatcgcctaccctaataccgcactcaatgaaaacatgaccmacccaatccattcgctcaaaagtataacccgttcaratccctattataaagaggttaatgmcrataaaatctatrrcatrracattaccctccccctaatrrrcaaraatyaaaatrttatarrcrcwctwaatttckttttaaacattgacwgctttttatactgm

SEQ ID NO: 9591 - DNA (genomic), 678 bp, Helicobacter pylori; double-stranded, circular
  misc_feature (B) LOCATION 1...678
  hypothetical: NO
  anti-sense: NO
atgaaaacgccttgcaacgcctattttctcaaaacgccacccaaaaacaaaaaaagaagagtttatgttaatttagcggtgtttctttttttattgctagcgagcgctttatggctcattcctagaagtgccatagaagraaagcccttagtcgtggcgacaaaacctagcagcgagcagtatattttgggcgaaattttaagccttttgttagaaaaacaccatatccctatcaagcgagcgtttggcattggtggggggacgatgaatatccatccggcattgattaggggcgattttgatttgtatgtggaatataccggcaccgcttgggtgaacacgctcaaaaaccctttgactcaaaaagtggattttgaaacgattaaaaagcgttatgagaaggaatttaatcttttgtgggtgggacttttgggctttaataacacctattctttagcgatttctaaagaagacgctcaaaaatacgcaattgaaactttcagcgatttagcctttcatagcccgaattttgattttggagcggagyttgatttttttgaaagagaggacgcttttaagggcttaatcaaagcttatcgctttcattttagaagtttgcatgaaatggayattaatttgcgttataaaagttttgaatccctcataagatyaacgctt

SEQ ID NO: 9592 - DNA (genomic), 440 bp, Helicobacter pylori; double-stranded, circular
  misc_feature (B) LOCATION 1...440
  hypothetical: NO
  anti-sense: NO
atgagcagcgggttaatttacatttcrttagaagtcttggtarcgtgtttgatcaccgctctaatcatgtattatgtgatgaaaaagatctattacgctagagggcaagccattttaaaaggcgcttcagccaaagctaaattaatggaatttcaagcgaaatctttcgtggaagctgaagaaatgcgcatgaaaagccaagaatgcaagttgcaacagcaatatgaaaataagaatttgcaactccaaacccattttgataaaaaagaagcgcatttgaagcatttagaagcgcagcacaaagaatttgtaagagatgaaaaacgctatttggaaaaggaaaaaaaagagcttgaaaaagaacgccaaattttagaammagagagggaaaattttrrrrrscagcgcgcctttgtrrrgrrgsctcrrgccaaagcgct

SEQ ID NO: 9593 - DNA (genomic), 216 bp, Helicobacter pylori; double-stranded, circular
  misc_feature (B) LOCATION 1...216
  hypothetical: NO
  anti-sense: NO
atggcgaacatgatgatggcagcggccatgttagggattgattcttgcccgattgaagggtatgatcaagaaaaagtggaggcttatttagaggaaaaaggctatctaaacacggcagaatttggcgtgtcggtaatggccagttttggttatcgtaaccaagagattacccctaaaacccgctggaagacagaagttatttatgaagtgattgaa

SEQ ID NO: 9594 - DNA (genomic), 900 bp, Helicobacter pylori; double-stranded, circular
  misc_feature (B) LOCATION 1...900
  hypothetical: NO
  anti-sense: NO
gtgatcctgatatttatcatcgtggtggaagatcagaaaggcattttccctatcgcagcgtcaaaaagaaaaagccaaagctctgtgatcattgaagacgtgtgcttcagcaaagaggattttgtagaaggggcaaaagcgattgaggggcttttaaaaaaacatggctttaaggataatggcattatttttgggcatgcgttaagcgggaatttgcactttgtcgttacgccgattctagaaaatgaagctgaaagaaaagcgtttgaaaatttagtttctgagatgtttttaatggtgagcaaaagctctggctctattaaagccgaacatggcacaggcaggatggtagccccttttgtggaaatggagtggggagaaaaagcttataagatccacaaacaaatcaaggaattgtttgatcctaatggccttttaaaccctgatgtgatcatcacaaacgataaagaaatccacactaaaaatttaaagagcatttaccctattgaagagcatttggacatgtgcatggaatgtgggttttgtgaaaggatctgccccagtaaagatttatccttaacgccacgacaacgcatcgtcatccacagagaggtagagcgtttgaaagaaagggtaagtcatggtcatgatgaagatcaggttttactagatgagcttttaaaagagtctgaatacttagcgcatgccacttgcgcggtgtgccatatgtgttccactttatgccctttagggattgataccgggagyatcgctttaaatcattatcaaaaaaaccctaaaggcgaaaagatcgcttcaaagattcttaaatcacatgcaaacgaccacaagcgtggctcgtttttctttaaaargcgctttcgtggtttcaaaaactca

SEQ ID NO: 9595 - DNA (genomic), 192 bp, Helicobacter pylori; double-stranded, circular
  misc_feature (B) LOCATION 1...192
  hypothetical: NO
  anti-sense: NO
gtgtatgacaaatccttgtgtaagaccatggcgctagcgttgaaggctttaggcgttaaaagggcgatggtggttaatggaggggggacaggtgaaatcgtgttgcatgacattacgcatgcgtgcgaattgaaaaataacgaaattttagagtatgatttgagcgctaaagattttgrtttrcccccctca

SEQ ID NO: 9596 - DNA (genomic), 312 bp, Helicobacter pylori; double-stranded, circular
  misc_feature (B) LOCATION 1...312
  hypothetical: NO
  anti-sense: NO
gtggctaaaaatttggtagcgagcggggtttgcgataaagcgaccgtgcagcttgcttatgcgattggggtgatagagcctgtgtctatttatgtgaacacgcataacacgagcaagcattcaagcgcggagttggaaaaatgcgtgaaatcggttttcaaactcacgccaaaaggcatcattgaaagcttggatttgttaagacccatttattcgctcacttcagcttatgggcattttgggcgcgagttagaagaattcacttgggaaaagactaacaaggttgaagagattaaagcgttctttaagcgt

SEQ ID NO: 9597 - DNA (genomic), 216 bp, Helicobacter pylori; double-stranded, circular
  misc_feature (B) LOCATION 1...216
  hypothetical: NO
  anti-sense: NO
gtgggatatatccctarggaaaagattgtaggcattagcgcgatcgctaaactcattgaaatttatagcaaacgcctgcaaatccaagaaaggctgaccactcaaattgcagaaacttttgatgaaatcatagagccaaggggcgtgatcgtggtttgtgaagccaagccacttgtgcatgagcatgcaaggggtgcaaaagcaaaatgcgatcat

SEQ ID NO: 9598 - DNA (genomic), 162 bp, Helicobacter pylori; double-stranded, circular
  misc_feature (B) LOCATION 1...162
  hypothetical: NO
  anti-sense: NO
atgatctatttagggaagaaaaattttaacgcccttttgaaaggggcgtatttaatggatgagcattttagaaacgccccttttgaaagcaatttacccgttttaatgggattaatctggcgtgtggtatatctaactttttttccaatccaaaaagccact

SEQ ID NO: 9599 - DNA (genomic), 285 bp, Helicobacter pylori; double-stranded, circular
  misc_feature (B) LOCATION 1...285
  hypothetical: NO
  anti-sense: NO
atggacattagcatttttagagaatacgatattagaggcatttaccccaccactttagatgaaaatacggcttttagtatcggcgtggagttgggaaaaatcatgcgagaatacgataaaagcgtgtttgtagggcatgacgcaagggtgcatgggcgttttttgtttgaagttttgagcgcggggctgcaatcaagcggcttgaaagtgtatgatttagggctaatccccacaccggtagcgtattttgcggcctttaatgaaatagacaatatccaatggccc

SEQ ID NO: 9600 - DNA (genomic), 564 bp, Helicobacter pylori; double-stranded, circular
  misc_feature (B) LOCATION 1...564
  hypothetical: NO
  anti-sense: NO
atgaaaagcattggagaagtgatggcgatagggggcaatttcttagaagccttacaaaaagcgttatgctctttggaaaacaattggctagggtttgaatcgttaagcaaagatttagaggcgataaaaaaggaaatccgccggcccaatcccaaacgcttgctctatattgctgatgcgttcaggttgggcgtttctgtggatgaagtgtttgaattatgccagattgacaggtggtttttatctcaaattcaaaaactagtcaaagcagaagagggcatcaattctagcgttttaacggacgccaaaaaattgagagggcttaaaaatttaggctttagcgatgccaggattgccactaaaatcaaagaaaatgaaaatttagaggtcagcccttttgaagtggaattagctagatctaatttacaaatcgcgccccattttgaagaagtggacacttgcgcggcggagtttttatcgctcacgcttatttgtattccacctatgcccctaaccctttgccccctattggaaacaaacaagaaaaacaagaaaagaaaatcc

SEQ ID NO: 9601 - DNA (genomic), 831 bp, Helicobacter pylori; double-stranded, circular
  misc_feature (B) LOCATION 1...831
  hypothetical: NO
  anti-sense: NO
gtgaaaataaccataatgattaaagattttaaccactattgtagaaaaataacgagagggtttgtaaaaattcccaccaaaaaacaaggagcaaaaaagatgaaaaaagcgggttttctttttttggcggcgatggctatcattgttgtgagtttaaacgccaaagatccgaatgtgttgcgtaagattgtttttgagaaatgtttgcctaattatgagaaaaatcaaaatccttcaccatgcatagaagtcaaacccgacgccggctatgtggttttaaaagatattaacggtccgttgcaatatttgttgatgccaacgactcacattagtggcattgaaaaccctttgttgcttgatccttctacgcctaactttttttacttgtcatggcaagcgcgcgattttatgagtwaaaaatacggaaaacccattcctgattatgcgatctctttgacgatcaattctaaaaaagggcgatcgcaaaaccattttcacatccatatttcttgcattagccttgatgtgcgcaaacagctggataataatctaaaaaatatcaacagccgttggtcgccattatcaggtggcttgaacgggcataaatatttggcgcgtcgggtaacagagagcgaattagcgcaaaaaagcccgtttgtcatgcttgctaaagaagtgcctaacgcgcacaaacgcatgggagactatggcttggcggtggtgcaacagagcgataactcctttgtcttgttagcgacacaatttaacccattgactttaaatcgcgcttcagccgaagagattcaagatcatgaatgcgcgattttgcgt

SEQ ID NO: 9602 - DNA (genomic), 354 bp, Helicobacter pylori; double-stranded, circular
  misc_feature (B) LOCATION 1...354
  hypothetical: NO
  anti-sense: NO
atggtagctttaagcaacgctctttcaagggtttttggttctgtggctggctataaattcccttcttttatccaaaaaagcatcaacgctctttatgttaagatctttaaaattgatttgagcgagtttgagcctttagaaaattataagagtttgaacgctcttttcatgcgctctttaaaaaaagaacgcccctttgacaaagcccctatatttgcattgcgccttgcgatggctttaatcactgaatgcgcttttttagacaacgatagcgctttacaaattaaaggcatgccctataaagcgcatgaattagtgggcgaaatcaaccccttaagccctcttttttctatg

SEQ ID NO: 9603 - DNA (genomic), 426 bp, Helicobacter pylori; double-stranded, circular
  misc_feature (B) LOCATION 1...426
  hypothetical: NO
  anti-sense: NO
atggcgttttggcaggctatccggtggtggattttaaagttaccctttatgatgggagctaccatgatgtggattctttcagaaatggcgtttaaaatcgctggytytatggcgtttaaagaagcgagtcgtgcggctaacccggttttactagagcctatgatgaaagtggaagtggaagtccctgaagaatacatgggcgatgtgattggcgatttaaacagaagaagagggcaaatcaattctatggacgatagattaggtttgaaaatcgtgaatgctttcgtgccgttagtggaaatgtttggttattctacggatttgcgatcagccactcaagggcgtgggacttactctatggagtttgaccactatggcgaagtgcctagcaatatcgctaaggaaatcgtggaaaaacgcaaaggc

SEQ ID NO: 9604 - DNA (genomic), 363 bp, Helicobacter pylori; double-stranded, circular
  misc_feature (B) LOCATION 1...363
  hypothetical: NO
  anti-sense: NO
atggaggctttaaacgctttgaacgcgcaaagtgatgagcaaattttatgcgagggttattttgtgttgttgcaaatcttagagcctatgatcccgcacacggcatgggaattgagcgagaggctttttaaaagagagaatttcaagcctatagaagtagatgaaagcgctttgatagaagactttatgactttagggcttaccattaatggcaaaaggcgcgcggaattgaaagtcaatattaacgctagcaaagaagagattattattttggctaaaaaagaattagagaaatatttagaaaacgcgagcgttaaaaaagaaatttatgtgcctaataaacttgttaattttgttaccgca

SEQ ID NO: 9605 - DNA (genomic), 264 bp, Helicobacter pylori; double-stranded, circular
  misc_feature (B) LOCATION 1...264
  hypothetical: NO
  anti-sense: NO
atgagcctaccaccggtttgcattttgaaagatgtgaatcaccttttacaagtcttrcattctttggtggcgttaggcaattccatgctagtgattgagcataatttagacatcatcaaaaacgctgactacattatagacatggggcctgatgggggggataagggcgggaaagtcattgcgagcggcacgcctttagaagtggcgcaaaattgcgaaaaaacccaaagctatacgggaaaatttttagctttggaattgaaa

SEQ ID NO: 9606 - DNA (genomic), 39 bp, Helicobacter pylori; double-stranded, circular
  misc_feature (B) LOCATION 1...39
  hypothetical: NO
  anti-sense: NO
gtggctcttgtgtttgatagtttgatagagaacaagaag

SEQ ID NO: 9607 - DNA (genomic), 5 bp, Helicobacter pylori; double-stranded, circular
  misc_feature (B) LOCATION 1...5
  hypothetical: NO
  anti-sense: NO
atggg

SEQ ID NO: 9608 - DNA (genomic), 279 bp, Helicobacter pylori; double-stranded, circular
  misc_feature (B) LOCATION 1...279
  hypothetical: NO
  anti-sense: NO
gtgctaaagacattatccatacgattagtcatacttttaaattgctccctagcgacaaacgcttgcagtggggtgcaaaaattgcgcgatgaaagccaccggtatgcgataaacttccatagatccactaaacttaaaaacatgaaacaaatcgctcttttaaaagaaaagggcataggagaagccagcgtgaaaaaattgttggattattttgggagttttgaagcgatagaaaaagcgagcgatcaggaaaaaaacgccgttttaaaaaaacgaaaa

SEQ ID NO: 9609 - DNA (genomic), 198 bp, Helicobacter pylori; double-stranded, circular
  misc_feature (B) LOCATION 1...198
  hypothetical: NO
  anti-sense: NO
gtgtgtggggctcatggaaagagcagtatcacggycatgttgagcgcgatttgccccgcttttggassgattattgggcggcattctaaagagtttgattccaatgtssgagagagcgcggatatgagtttggtttttgaasccgatgaaagtgattcaagtttttttattttccaaccctttttgcgcgattgtgcc

SEQ ID NO: 9610 - DNA (genomic), 561 bp, Helicobacter pylori; double-stranded, circular
  misc_feature (B) LOCATION 1...561
  hypothetical: NO
  anti-sense: NO
atgcgaatacttcattatggaggtgagctcccatgcgattgtccaaaacgcatcgctgggcttgatttcgctcttaaaattctcaccaatatcacaagcgatcatttagatttccatcaaaatatagaaaattacagggacgctaaaaacagcttttttaaagatgagggcttaaaagtcatcaacagagatgaaacaaacgccctttttaaccccattaacgcgcgcacttacgcactggataaaaaagcgcatttgaatgttcaagccttttcgctcaacccttccattagcgcgtctttatgctaccaacacgatttaagagatcccaatcttaaagaaaccgccctgatccattccccccttttagggcgttacaacctttataatattttagcgggcgttttaggggttaaattgctcactcaattgcctttagaaacgatcgcaccgttattggaaaacttttatggggttaaggggcgtttggaaattgtacattctaaacctttagtggtcgtggattttgcccacacaacagacggcatgcaacaagttttt

SEQ ID NO: 9611 - DNA (genomic), 582 bp, Helicobacter pylori; double-stranded, circular
  misc_feature (B) LOCATION 1...582
  hypothetical: NO
  anti-sense: NO
gtggggagctttttattcgtggggcctagtggggtagggaaaacagaattggctaaagaattggccttgaatttgmatttgcattttgaacgctttgacatgagcgaatacaaagaagcccatagcgtggcaaagctcatcggaagtcctagcggttatgtggggtttgagcaaggggggttattggtgaatgcgattaaaaagcacccgcattgtttgctgcttttagatgagatagaaaaggcccaccctaatgtgtatgatttgttgttgcaggtgatggakaacgccactttgagcgataatttaggcaacaaggcgagttttaagcatgtgatactgattatgackkcaartgtggggagtaaggataaggacacgctagggttttttagcactaaaaacgccaagtatgatagagccgttaaagagcttttaacccctgaattgcgatccagaattgatgcgatcgtgccgtttaacgcgctcagtttggaggattttgaaacgcattgtttctgtggaattggacgggttaaaagccctagcactagagcaaggcgtgatcttaaaattccataa

SEQ ID NO: 9612 - DNA (genomic), 279 bp, Helicobacter pylori; double-stranded, circular
  misc_feature (B) LOCATION 1...279
  hypothetical: NO
  anti-sense: NO
gtggaaaaagcccatccggatgtgtttaacctcttgttacaggttttagatgaggggcatttaaccgatagtaagggcgtgagggtggatttcaaaaacacgattttgattttaaccagcaatgtggctagcggcgcgcttttagaagaggatttgagtgaagccgataaacaaaaagcgatcaaagagagcctgagacaattcttcaagccggaatttttaaaccgcttagatgaaatcatctcctttaacgccctagatagtcatgctatcatctaa

SEQ ID NO: 9613 - DNA (genomic), 840 bp, Helicobacter pylori; double-stranded, circular
  misc_feature (B) LOCATION 1...840
  hypothetical: NO
  anti-sense: NO
atgaaactgagagcaagtgttttaatcggtgtggcaattctgtgcttaattttaagtgcgtgcagtaactatgcgaaaaaagtggtgaaacaaaagaaccatgtttatacgcctgtgtataatgaactgatagagaagtatagtgagatccccttaaatgacaaactcaaagacacaccattcatggtgcaagtgaagttgccaaattacaaggactatttgttggataataaacaagttgtactaactttcaaacttgttcaccattctaaaaagattacgctcataggcgatgccaataagatcctccaatacaagaattacttccaagctaacggggcaagatctgacattgatttttacttgcaacccactttgaatcaaaagggtgtggtgatgatagcgagtaactacaatgataatcccaacaacaaagaaaaaccacagacctttgatgtgttgcaaggaagtcagccaatgctaggagctaacacaaaaaacttgcatggctatgatgtgagtggagcaaacaacaagcaagtgatcaatgaagtggcaagagaaaaagctcagctagaaaaaatcaatcagtattacaagactctcttgcaagacaaggaacaagaatataccactaggaaaaataaccaacgagaaattttagaaacattgagtaatcgtgcaggttatcaaatgaggcagaatgtgattagttctgagatttttaagaatggcaacttgaacatgcaagccaaagaagaagaagttagggagaagctacaagaagaaagagagaatgaatacttgcgcaatcaaatcagaagtttgctcagtggtaag

SEQ ID NO: 9614 - DNA (genomic), 633 bp, Helicobacter pylori; double-stranded, circular
  misc_feature (B) LOCATION 1...633
  hypothetical: NO
  anti-sense: NO
atggggaaaatttcagcgcatttagcccatgaaatcagaaaccccgtaggctctatctctcttttagcttcggtgttattaaagcatgcgaacgaaaaaactaaacccattgttgtagaattgcaaaaagctttatggcgcgtagaaaggatcattaaagccaccttgcttttttctaaaggcattcaagccaaccgcaccaagcaaagtttgaaaacgctagagagcgatctcaaagaagccctaaactgctacacttactctaaagacattgattttctttttaattttagcgatgaagaagggttttttgactttgatttaatggggattgtgttacaaaatttcttgtataacgccattgatgcgattgaagccttagaagagagcgaacaaggtcaggtcaaaattgaagcgttcattcaaaatgaatttattgtcttcaccattattgataatggcaaggaagtggaaaataaaagcgctttatttgagccttttgaaaccactaaattaaaggggaatggcttagggttagccctgtctttgcaagtcgttaaagcccatgaagggagcattgcgctattagaaaatcaagaaaaaacctttgaaattaagattcttaacgcttct

SEQ ID NO: 9615 - DNA (genomic), 426 bp, Helicobacter pylori; double-stranded, circular
  misc_feature (B) LOCATION 1...426
  hypothetical: NO
  anti-sense: NO
atgattacgatcgttattgcaaaagcggggaatatagtcaaagycgatatttttacgcacattagcgatattaaaatggggcttattaaaggaggtcaatggggggttattggtttaggcaatatcggtaaaagagtcgccaagctcgctcaagctttcggggcaaaggtggtgtatttttcccctaaagataaaaaagaagaatacgagcgcttgagtttagaggaattgcttaaaacaagcggtattatcagcattcatgcccccttaaatgaaagcacgcgcgatttaatcgctctgaaagaattgcaaagcttaaaagatggggcgattttaatcaatgtggggcgtgggggcattgtgaatgaaaaggrtttggctttrrttttagaaaccacagatttgtattacgcgagcgatgtgttt

SEQ ID NO: 9616 - DNA (genomic), 300 bp, Helicobacter pylori; double-stranded, circular
  misc_feature (B) LOCATION 1...300
  hypothetical: NO
  anti-sense: NO
atgaaagaacaagaatgggatttaagcgctttatttgaaaataaagaaagcgcagaagaatttttaaaaaccttacaaacagaagtgcaagaatttgagaacgcttatcaaaataaccttaagaatttagacgctgcaaaatttgccaacactcttaaacattacgaaaatttgtcagaaaagatctctagagcgatggcttacgccaattactttttgccaagaacactaaagaagcgaagttttattcgcaatgcaaatggcttgtgcaaatatccaacaacaccttttattctttga

SEQ ID NO: 9617 - DNA (genomic), 324 bp, Helicobacter pylori; double-stranded, circular; identical to SEQ ID NO: 3384
  misc_feature (B) LOCATION 1...324
  hypothetical: NO
  anti-sense: NO

SEQ ID NO: 9618 - DNA (genomic), 507 bp, Helicobacter pylori; double-stranded, circular
  misc_feature (B) LOCATION 1...507
  hypothetical: NO
  anti-sense: NO
atgttatcttctaatgatttgtttatggtcgttttaggggcgattttattggtgttggtgtgcttggtggggtatttgtatcttaaagaaaaagagttttaccataaaatgaggcgtttagaaaaaactttagatgaatcctatcaagaaaattatctctattctaagcgtttgagagaattagaggggcgtttggaaggcctttctttagaaaaaagcgctaaagaggacagctcattaaaaacgactctttcgcacctttataaccagttgcaagaaatccaaaaatccatggataaagagcgcgattacttagaagaaaaaatcattmyttrgaaaacaawtttwaagacatggggcattatgccgctagcgatgaagtcaacggaaaaacaggttttgaaaatgtatcaagaaggctatagcgtggattctatttctaaagaatttaaagtgagtaagggcgaggtggaatttatattgaacatggcagggttaaaatggtag

SEQ ID NO: 9619 - DNA (genomic), 624 bp, Helicobacter pylori; double-stranded, circular
  misc_feature (B) LOCATION 1...624
  hypothetical: NO
  anti-sense: NO
gtggtggctgatgaggtgagaaagctcgctgaaaaaacccaaaaagccactaaagaaatcgctgtcgtggttaaaagcatgcaacaagaagcgaacgatattcaaaccaacacccacgatattaattctattgtaggctctattaagggtgatgtggaagagcttaaatccaccgtaaaaaataacatgattgtcgcgcaagccgcaaaatacaccatctacaatatcaataaccgggtgttttgcggtytggctaaactcgatcatgtggtctttaaaaacaatctttatggcatggtgcstttggtctcaattcctttgacattaccagcccataagagttsccgtttaggcaaatggtattatgagggtgcgggtaaagaaaactttgctaacacttcaggctatagagctttagaaagccaccatgcgagcgtgcatgctgaagctaatgatttggttaaagccgttcaagaagatcacgtcaccgattcaaaatacctagaacataaagtgcatttaatggaagatagcgctaagcatgtcaaagaaaatattgataagatgttttatgaaaaacaagatgaactcaataaaatcattgaaaaaattcaaaaaggcgaa

SEQ ID NO: 9620 - DNA (genomic), 1134 bp, Helicobacter pylori; double-stranded, circular
  misc_feature (B) LOCATION 1...1134
  hypothetical: NO
  anti-sense: NO
ttggctcaaccggttcaggtaagaacagtgtttatgtccatgactctaaacgctatggggcaatttgcctataattttcctgctaatatcagcaaagacaagcaaaagctcactatggtttatatggataaagattatggcgcttatgggaatattgttgcaatgggtggggagtatgtcaagattgagctagggacagatacaggattaaatccttttgcttgggcagcttgtgtgcaaaaaacaaatgcaacaatggagcaaaaacaaacagctatttctgttgtcaaagagcttgtgaaaaacttagcaactaaaagcgatgaaaaagatgaaaatggcaacagcatctcttttagcctagcagattctaatacgcttgcagcggcagtaaccaaccttatcacaggagatatgaacctagattatcctatcactcaacttattaatgctttcgggaaagaccacaatgatcctaatgggcttgtcgcgcgattagcgcctttttgcaaatcaaccaatggtgaatttcaatggctttttgacaataaagcaacagatcgcttagatttttcaaaaacgattattggcgttgatgggtcaagtttcttagacaataatgacgtttcgccttttatttgtttttaccttttcgctcgtatccaagaagcaatggatgggcgtagatttgtcttagatattgatgaagcgtggaaatatttaggcgatccaaaggtcgcttattttgtgagagacatgctaaaaactgcaaggaaaagaaacgctattgttagacttgcgactcaaagcatcactgatcttttggcttgccctattgctgatacgattagagaacaatgccctacaaagatttttttgagaaacgatgggggtaatctttctgattaccaaagattagccaatgttacagaaaaagaatttgaaatcatcactaaggggctggataggaaaatcctctacaaacaggatggaagccctagcgttatcgctagttttaatttgagaggcattcctaaagaatatttgaaaattttatccacagatactgtatttgtcaaagaaattgacaagattatccaaaaccatagtatcatagataaatatcagccttga

SEQ ID NO: 9621 - DNA (genomic), 285 bp, Helicobacter pylori; double-stranded, circular
  misc_feature (B) LOCATION 1...285
  hypothetical: NO
  anti-sense: NO
atggggattgcaaccagtctcatcagtgaggtttctaagttttattacgctttaaaataccatgcgaaatttatgagcttgggggagcttgggtgctatgcgagccattattcgttgtggcaaaaatgcatagagctcaatgaagcgatctgtattttagaagacgatataaccttgaaagaggattttaaagagggcttggattttttagaaaaacacatccaagagttaggctatgcgcgtttgatgcatttattgtatgatgccagcgtgaaaagtgagcct

SEQ ID NO: 9622 - DNA (genomic), 606 bp, Helicobacter pylori; double-stranded, circular
  misc_feature (B) LOCATION 1...606
  hypothetical: NO
  anti-sense: NO
atgaaatatttatggctttttttaatatacgctatagggctttttgcaacagataaaacgctagatattattaaaaccattcaaaaacttcctaagattgaagtgcgctactccatagataacgatgccaattacgctttaaaattgcatgaagtcttagcgaacgatttaaagactagccagcattttgatgtttctcaaaacaaagagcaaggtgctatcaattacgcagaactcaaggataaaaaagtccatcttgtagcgcttgtgagcgtggcggtagaaaacggcaataaaatttcacgattaaaactttatgatgtggatacaggaacgctcaaaaagacttttgactaccccattgtaagtttagatctatacccttttgcagcgcacaacatggccattgtggtgaatgattatttaaaagccccttctatcgcttggatgaagcgcctgattgttttttctaaatacattggaccaggaatcacaaacatcgcactagcgaattatacgatgcgttatcaaaaagaaatcatcaaaaacaaccgactcaatattttccccaaatgggcgaacgctgagcaaacggagttttattac

SEQ ID NO: 9623 - DNA (genomic), 792 bp, Helicobacter pylori; double-stranded, circular
  misc_feature (B) LOCATION 1...792
  hypothetical: NO
  anti-sense: NO
gtgggaggagcgagctttatttctgggggcaatggcacgctttatggcttgaatgtgggctatgaccgattggttaaaagcgtgatccttgggggttatgtggcttatggctatagcggttttaacgggaacatcatgcattctttggctaataatgtggatgtggggatgtatgcgagggcttttttgaaaagaaacgaattcactttgagcgcgaatgaaacttatggaggcaatgcgagtcatatcaattcttctaattccttgctctctgtgttgaaccaacgctacaactacaacacctggacaacgagcgtgaatgggaattacggctatgatttcatgttcaaacaaaaaagcgtggtgctaaaacctcaagtgggcttgagctatcatttcataggcttgagcgggatgaaaggtaaaatgcaaaatccagcttaccaacaattcgtcatgcattcaaacccttctaacgaatcggttttaacgctcaacatggggttagagagccgtaaatattttggtaaaaattcctattattttgtaacggcgaggttgggtagggatcttttgatcaaagctaaaggcgacaatgtggtgcgttttgtgggtgaaaacactttattgtaccgcaagggggaaatttttaacacttttgcgagcgtgatcacaggaggcgaaatgcatttgtggcgtttgatgtatgtgaatgcgggggtggggcttaaaatgggcttgcaataccaagatcttaatatcactgggaatgtgggcatgcgagtggcgttt

SEQ ID NO: 9624 - DNA (genomic), 531 bp, Helicobacter pylori; double-stranded, circular
  misc_feature (B) LOCATION 1...531
  hypothetical: NO
  anti-sense: NO
atgaagaaaagaaaacatgtatccaagaaagtgtttaatgtcattatcttgtttgtggcagtattcactcttttagtcgtcattcacaaaaccctttcaaacggcattcacatacaaaatttaaaaattggaaaacttggcatttctgaattatacttaaaactcaataacaagctttctttggaagttgagcgggttgatctctcttctttcttccatcaaaaacccactaaaaagcgtttagaagtttctgatttgattaaaaatatccgttatggcatttgggcggtgtcttattttgaaaaacttaaagtcaaagaaatcattttagacgataaaaataaagccaatatcttttttgatgggaataaatacgagttwagaatttccaggaatcaaaggggaattttccctagaagacgattaaaaatatcaagcttaaaatcatcaatttgctttttaaagatgttaaagtccaagtggatggcaacgcccactattcrcccaaagccaggaaaatggcgttcaatt

SEQ ID NO: 9625 - DNA (genomic), 258 bp, Helicobacter pylori; double-stranded, circular
  misc_feature (B) LOCATION 1...258
  hypothetical: NO
  anti-sense: NO
atgagtaagagcgcgatttttgttctttctggctttttagcgttcttgctctatgctttgttattatatggtttgttgttagaaaggcataataaagaagcagagaaaatccttttagatttaaataaaaaggacgaacaagccattgacttgaatttagaagatctgccaagcgagaaaaagaatgaaaaaattraaaaagtaacggaaaaacaggacgattttttagagcctaaaagaagaacccaaagaggagcc

SEQ ID NO: 9626 - DNA (genomic), 318 bp, Helicobacter pylori; double-stranded, circular
  misc_feature (B) LOCATION 1...318
  hypothetical: NO
  anti-sense: NO
atggaagtagagcatggcaagattgaaaccactttaagcttgggggcgtctcatttggaagtcattaaaatgatgcttttagagagcctgccttctttagtgaataatatcaccatcactttaatttctctaataggctattcggctawggcyggagcgttaggggctgggggattgggggatttagccattaggattggctatcaaagttataggggcgatgtgcttttttatgcggtggtcgtgatcatcgttttagtgcaaatcattcaaagcgcgggggattatgtggtgaaacgcttgagaaagaataagtat

SEQ ID NO: 9627 - DNA (genomic), 726 bp, Helicobacter pylori; double-stranded, circular
  misc_feature (B) LOCATION 1...726
  hypothetical: NO
  anti-sense: NO
gtggggcttatgaaaataagatttatggggcggagtgtttttgtgggggatttggaacgcattgaagaagtggctagatttgaagaattttggcttttaggggggcaaaaagcgatcaaagagcctagaagattggttttagaaatcgctttaaaacaccagctcaacaagcttttaaaacgcgttcaaaagcatttcaaagaagacgaattaggaatttttaaacaaatgcatgacaaaaaaattcaaagcgtcgccaccaattccatagggcgtttgtttgatatagtggcgtttagtttgggcgtggtgggaacgattagttttgaagccgagagcgggcaggttttagaaaatctagccctacaaagcgatgagatcgctttttacccttttgaaatcaaaaacagcgtggtgcgtttgaaggaattttatcaagcgtttgaaaaggatttgggcgttttagaacccaaacgcatcgctaagaaattttttaacagcttagtagaaatcattaccgctttgattgcgccttttaaagggcatgtcgtggtgtgcagtgggggcgtgttttgcaaccaattgttgtgcgaacaattagccaagcgattgaaaaagcttcaaagggagtattttttccacaagcatttcccccctaatgacagyagtatccctgtcggtcaagccttaatggcgtatttcaaccctacaatcatcaaaaaagga

SEQ ID NO: 9628 - DNA (genomic), 234 bp, Helicobacter pylori; double-stranded, circular
  misc_feature (B) LOCATION 1...234
  hypothetical: NO
  anti-sense: NO
gtggggggcattgtggcaaacatgaacgatctttcaacttacatggttgagaatttactcatgggtttgtatcttttttctagcgctttagatttgggcgtgaaaaaagccattaatctagcgagctcttgcgcttatcctaaatacgcccctaaccctttaaaagagagcgatttattgaacggctctttagaaccaacgaatgaaggctacgctttgccaaactctctgtrr

SEQ ID NO: 9629 - DNA (genomic), 555 bp, Helicobacter pylori; double-stranded, circular
  misc_feature (B) LOCATION 1...555
  hypothetical: NO
  anti-sense: NO
atggatttacaacaaattgatgagctagaaaataagtttgaagaacaagaagaacaagcccaagatacccccctaaaacaagagcctagcacaaaggaagtaaaaatccctaaaaaaagggggcgtaaaaaaagcttgttagatgaagataagaaaaagagctttaacattgcctttagtccttgtgtgataaaagaacttaatgaatttttgctagaatttggctcatttaaagagacacgaagcacttttattgaagaagcgcttattaggcatttaaaacacagaaaaaacacccaagagcaaaagcttttaaagcaactagaaagattacaaaacaaagaaaagggaataatgaaaacaatgaacttgaatgaattttttacgcataagataatctataaagacacccctttaaagtttaaggatacactagaacaagaaatcagccaagctagtttagtagagaagttaatcttagctaatatcttagccaatatggtgtttgctaagataagcaatgagaatgcccctaaaattcttattttcacggct

SEQ ID NO: 9630 - DNA (genomic), 180 bp, Helicobacter pylori; double-stranded, circular
  misc_feature (B) LOCATION 1...180
  hypothetical: NO
  anti-sense: NO
atggcgtttattctaaccacaaacctatttatcaagagttttacgaactcaattcgcataacgggttgtattatcagccctaatgtgttttttgcttatgaattttgcgcgttagggtttagaaaaggggggttaattttggataatttttctaaattcgtgagccacaggttgcaataa

SEQ ID NO: 9631 - DNA (genomic), 306 bp, Helicobacter pylori; double-stranded, circular
  misc_feature (B) LOCATION 1...306
  hypothetical: NO
  anti-sense: NO
atgcactatcaattaacaagtttcaatataatacaagatctttttataacttgtcatgtgttaaggatcaaaatgcgcgtgtttgtttgctttttaggggtttttgtatctaacggcttggctcgttttggctatgtggttttaatccccctactcattttatcagggagtttaaccccacaccaaagcttccaactgggtattgcggtgctaatgggctatgtttttgggagctttttaatccaatttttaagcccgttaatgtcattasaaagcatcgctaaaatcagttttaaattaacactt

SEQ ID NO: 9632 - DNA (genomic), 1413 bp, Helicobacter pylori; double-stranded, circular
  misc_feature (B) LOCATION 1...1413
  hypothetical: NO
  anti-sense: NO
atgcgcaaatttttggatggggcaaaaagtgaggttttaaaatacgatgtgatttcttttgatatttttgataccctccttctaagacctttcattaaacccacagatttatttttgtatattgagactaaatacaatattaaaggttttcatcaagcaaggatcctggcagaaatgcaatccagaaaattaagtaaaagacaagacattactctagatgaaatttatcatcaaatcccaaaagagtttcattcatataagggagtagaaatcgctactgaaaaagaggtgcttgttccaaacttggagatgttagaactctatcgtttcgctaaagagaacaataagagagtgattattgtatcagatatgtatttacctttagaggttcttgaagatattttaatttctaagggttttgatggttatacaaatttctatcttagtaaccatataatgctcactaaacattcaaaggatttgtttaagcatgttttaaaacaagaaaatattactaatacgcagatattgcatatcggtgataattcttgggcagatgacgctatgcctaaaagtttaggcatagcaacgctatttagaaaaagcgtgttgaaacaattagaagaagtttttcctaaatacaaaacatttaatccaaccagtgttgcgcaaagttttattttaggatctttatgcgttttttataaaaattatattcaaaaacatgaaaaatttgattattggtttcttttaggagcgatgcaggcaggaattgcagccgttgcttattgccagtttatctataaggagattcacaaaagaaatattgatactttagtgtttgttgcgcgagatggttatttattgcaaaaaatttttaatattttatatccaaattcatataaaactacttatgtctatgctcccagaattttaaaaaaagcggtatttttagaagtcgtagagggcgagagtttggaaattttgcgtattttagaaggcgaagaagaagttaaaaagaagcaaatcaccaccaaccaacaggcgtatgtatatctctatagcaattttgaacattgccgccatttagcgttaaaatgtttagataattacagaaaatacttgttttcatcaaatttagaaggaaatatcgctattgtagatacgattactttaggctattcttcgcaagggttaatccaaaaagctttaaataaagaagtttttgggtgctatgtggatctcctaagaattttaaattatgattgcgtgagtttcttacctttttcacaccctaaacccgtttattttcataattgggattttatggagtttttgctaacaagccctgaataccctattttaaatgtagaaaatggcgttccaatcttatcaaaaagacgtttcatcttg

SEQ ID NO: 9633 - DNA (genomic), 306 bp, Helicobacter pylori; double-stranded, circular
  misc_feature (B) LOCATION 1...306
  hypothetical: NO
  anti-sense: NO
gtgtgcgacattttttctgatggcgttttattggacaaagcgttagtgatttatttcaaagccccctatagtttcaccggtgaagatgtgtgcgaaatccaatgccatggaagcccccttttagcgcaaratatccttcaagcttgcttgaatttaggggctaggctcgctaaagcgggggaatttagcaaaaaagcctttttaaaccataaaatggatttgagcgagattgaagcgagcgttcarctcatcctttgtgaagrtgaaagcgttttaaacgctctagccaggcagcttcaaggggga

SEQ ID NO: 9634 - DNA (genomic), 375 bp, Helicobacter pylori; double-stranded, circular
  misc_feature (B) LOCATION 1...375
  hypothetical: NO
  anti-sense: NO
atggcggcttggaacactttagtagaaaaaatcatcgctcctaaacacaaggtcaaaattggttttgtgggcaagtatttaagcttaaaagaatcttataaatccttgattgaagccctaatccatgcgggggcgcatctggatacgcaagtcaatattgaatggctggatagcgagaattttaatgaaaagactgatttagagggcgttgatgcgattttagtgccggggggctttggagaaagggggattgagggcaaaatttgcgccattcaaagggctaggttagaaaaactcccctttttagggatttgtttgggcatgcaattagcgatcgttgaattttgtcgcaaatgttttaggcttgaaaggggc

SEQ ID NO: 9635 - DNA (genomic), 804 bp, Helicobacter pylori; double-stranded, circular
  misc_feature (B) LOCATION 1...804
  hypothetical: NO
  anti-sense: NO
gtgatttttatcgctaccgctaataatattgacaggatcccagctcctttaagagacagaatggaatttatcagcgtgtccagctacacgcctagcgaaaaagaagagatcgctaaaaactacctcatcccccaagaattagaaaagcacgccttaaagcctagcgaagtggatattagccatgaatgtttgaaactcattattgaaaaatacaccagagaagcgggcgttagggatttacgaagacagatcgcaacgattatgcgtaaagcggctttaaaatacctagaagataacccgcacaaaaaagggcggaccaaaaaaagcgaagacaaagataaaaaaggcggaaatgaagaaaacgaaaaaagaggtgagagtaaagatttttgcgtctctatcacgcctgataaccttaaagagtatttagaacgcatggtgtttgaaattgrccccatagatgaagaaaataaaatcggtatcgtcaatggcttggcatggactccagtgggcggtgatgtgcttaaaattgaagcggttaagattagaggcaagggggaattgaaactcaccgggagtttgggcgacgtgatgaaagaatccgccattattgccttttctgttgtcaaagtcttgttggataacgaaaccttaaaagtgcctaaaatccctagcgagaccgatgcagagaatwagaaaaagaaaaaagtgctgaaagtttwwaacgcttacgatttgcacttgcatgtccctaaggggctacgcctaaagacggcccgagcgctgggatcgctatggcgagcg

SEQ ID NO: 9636 - DNA (genomic), 765 bp, Helicobacter pylori; double-stranded, circular
  misc_feature (B) LOCATION 1...765
  hypothetical: NO
  anti-sense: NO
atgaaaaaaagattgaatatagggcttgtgggtttagggtgcgtggggagcacggtcgctaaaatcttacaagaaaatcaagaaatcattaaagacagagccggcgtggaaattaaaattaaaaaagcggtggtgcgagacgtgaaaaaacacaagggctatgcttttgaaatcagtgatgatttagaaagcgtgatagaagataaagggattgatattgtcgtggagcttatgggtggggtggaagcgccttatcttttagctaaaaaaactttagccaaacaaaargccttcgttacagccaataaagccatgttagcgtaccaccgctatgaattagaacaaatcgctaaaaacacccccataggctttgaagcgagcgtgtgtgggggtatccccattatcaaggctttaaaagacggcttgagcgctaatcacatcctttcttttaaagggattttaaacggcacgagcaattacattttaagccagatgtttaaaaatcaagcgagctttaaggacgctttgaaagacgcgcagcatttaggctatgcggaattgaaccctgaatttgacattaagggcattgatgcggcgcacaaattattgattttagcgtctttagcgtatggcattgatgcgaaattagaagaaatcttgattgaaggcattgaaaagatagagccagatgacatggaatttgcaaaagagtttggttatagcatcaaacttttaggcatcgctaaaaaacaccagggattgcat

SEQ ID NO: 9637 - protein, 62 aa, Helicobacter pylori
  misc_feature (B) LOCATION 1...62
  hypothetical: YES
MAEEEKTELPSAKKIQKAREEGNVPKSMEVVGVFRVIGWANEYFCFFYMVGGMALARCIAMC

SEQ ID NO: 9638 - protein, 260 aa, Helicobacter pylori
  misc_feature (B) LOCATION 1...260
  hypothetical: YES
MSEDLPFASDSQFTYNGVSITRPTNEVNDVISGVNITLEQTTEPNKPAIISVSRDNQAIIDSLKEFVKAYNELIPKLDEDTRYDADTKIAGIFNGVGDIRAIRSSLNNVFSYSVHTDNGVESLMKYGLSLDDKGVMSLDEAKLSSALNSNPKATQDFFYGSDSKDMGGREIHQEGIFSKFNQVIANLIDGGNAKLKIYEDSLDRDAKSLTKDKENAQELLKTRYNIMAERFAAYDSQISKANQKFNSVQMMIDQAAAKKN

SEQ ID NO: 9639 - protein, 206 aa, Helicobacter pylori
  misc_feature (B) LOCATION 1...206
  hypothetical: YES
VRLNAAVVVDGKYKIALEDGANALEYEPLSDEXXKKINXLVKQAIGDNQNRGDDVAVSNFEFNPMVPMIDNATLSEKIIYKTQKILGLFMFLIKVYLVFIVLFIFYKKVIVPFSERMLEVVPDEDKEVKSMFEEMNEEEDELNKLGDLRKKVEDQLGLNASFSEEEVRYEIILEKIRGTLKERPDEIATLFKLLIKDEISSDSAKG

SEQ ID NO: 9640 - protein, 80 aa, Helicobacter pylori
  misc_feature (B) LOCATION 1...80
  hypothetical: YES
MLVGISNAINIIDGFNGLASGICAIALLVIHYIDXSSLSCLLAYMVLGVYGVKXPFRKDFLGRSGGRIFWVWXXXFLSCI

SEQ ID NO: 9641 - protein, 82 aa, Helicobacter pylori
  misc_feature (B) LOCATION 1...82
  hypothetical: YES
MPDNLHLHTLLXKFLQQRSFNYPNPLCAFILILCNLPFILISVLFRLDAYALIVISLVFIXCYLIGXAYLNRQVCALEKRAF

SEQ ID NO: 9642 - protein, 153 aa, Helicobacter pylori
  misc_feature (B) LOCATION 1...153
  hypothetical: YES
VGANPVPHAQILQSVVDDLKEKGIKLVIVSFTDYVLPNLALNDGSLDANYFQHRPYLDRFNLDRKMHLVGLANIHVEPLRFYSQKITDIKNLKKGSVIAVPNDPANQGRALILLHKQGLIALKDPSNLYATEFDIVKNPYNIKIKPLEAAVIA

SEQ ID NO: 9643 - protein, 121 aa, Helicobacter pylori
  misc_feature (B) LOCATION 1...121
  hypothetical: YES
LDPFSHKENFLAVETFKMLGKTESKDNLNWMIALIIEKDKVYEQVGSVRFVVVVASAIMVLALIIAITLLMRAIVSNRLEVVSSTLSHFFKLLNNQXHSSXXKLVXARSNDELGRXQTXDX

SEQ ID NO: 9644 - protein, 90 aa, Helicobacter pylori
  misc_feature (B) LOCATION 1...90
  hypothetical: YES
MEIQQTHRKINRPLVSLVLAGALISAIPQESHAAFFTTVIIPAIVGGIATGTAVGTVSGLLSWGLKQAEEANKTPDKPDKVWRIQAGKGL

SEQ ID NO: 9645 - protein, 93 aa, Helicobacter pylori
  misc_feature (B) LOCATION 1...93
  hypothetical: YES
VEARYYYGDTSYFYLHVGVLQEFAHFGSNDVASLNTFKINAARSPLSTYARAMMGGELQLAKEVFLNLGVVYLHNLISNASHFASNLGMRYSF

SEQ ID NO: 9646 - protein, 141 aa, Helicobacter pylori
  misc_feature (B) LOCATION 1...141
  hypothetical: YES
VYSRFFANQHEFDFEAQGALGSDQSSLNFKSTLLQDLNQSYNYLAYSATARASYGYDFAFFRNALVLKPSVGVSYNHLGSTNFKSNSQSQVALKNGASSQHLFNANATWKRVIIMGTLHTFICMWEFYKSSLTLDRMMWRL

SEQ ID NO: 9647 - protein, 88 aa, Helicobacter pylori
  misc_feature (B) LOCATION 1...88
  hypothetical: YES
MFKKIIFLCVFLIGGFVIPPLEAMPILRNKTPKKNYQEAHEKLYRSIINRQXXTRKKSGWYFLGGVGAVEAIKDYQGKEMKDWMPRSI

SEQ ID NO: 9648 - protein, 80 aa, Helicobacter pylori
  misc_feature (B) LOCATION 1...80
  hypothetical: YES
MKKFFSQSLLALIISMNAVSGMDGNGVFLGAGYLQGQAQMHADINSQKQATNATIKGFDALLGYQFFFEKHFGLRLYGVF

SEQ ID NO: 9649 - protein, 10 aa, Helicobacter pylori
  misc_feature (B) LOCATION 1...10
  hypothetical: YES
MEHLTRGIKH

SEQ ID NO: 9650 - protein, 127 aa, Helicobacter pylori
  misc_feature (B) LOCATION 1...127
  hypothetical: YES
VFTYSLGQVFFSLSIGLGINITYAAVTDKTQNLLKSTIWVVLSGILISLVXGLMIFTFVFEYGANVSQGTGLIFTSLPVVFGQMGAIGVPCFNSFLARARFCWHHFYGGFIRAKRDVSYRKVSILSF

SEQ ID NO: 9651 - protein, 127 aa, Helicobacter pylori
  misc_feature (B) LOCATION 1...127
  hypothetical: YES
MENSTLYIVIAGLWLAVGFGIFLKKLDMPVIIGYICTGTVLAAFFKINDFNLLSDIGEFGIVFLMFMIGIEFNFDKLKSIKQEVLVFGLLQVVLCALIAFLLGYFVLGLSPIFSLVLGMGLSLSSTA

SEQ ID NO: 9652 - protein, 68 aa, Helicobacter pylori
  misc_feature (B) LOCATION 1...68
  hypothetical: YES
VAKDIISESQNLCARKFRRLYALLKENEMLIRIGSYQMGNDKELDEAIKKKALMEQFLVQDENALXAF

SEQ ID NO: 9653 - protein, 182 aa, Helicobacter pylori
  misc_feature (B) LOCATION 1...182
  hypothetical: YES
VGLLNSKAFKPYRKILQMVFQDPYASLNPRLSIQSILIEALRFAYPKASQQEWHHLAELCLEEVCLNPELLNFYAYELSGGERQRVAIARAIALKPRIILLDEPTSALDKSIQKSVLELLLNLQEKQDLSYLFISHDLDVIKAFCDRVLVVSEGKIVETGAIEEVFDNPKHAYTKRLLESRL

SEQ ID NO: 9654 - protein, 288 aa, Helicobacter pylori
  misc_feature (B) LOCATION 1...288
  hypothetical: YES
MAAKSKAXTLKVFSKFFSNFKITKLKDNHEEAHKLFGENSRKAHDTEIIYSTLQVVPRYSIETVGFSLLILAVAYILFKYGEARMVLPTISMYALALYRILPSVTGVISYYNEIAYNQLATNVVFKSLSKTIVEEDLVPLDFNEKITLQNISFAYKSKHPVLKNFNLTIQKGQKIALIGHSGCGKSTLADIIMGLTYPKSGEIFIDNTLLTSENRRSWRKKIGYIPQNIYLFDGTVGDNIAFGSAIDEKRLIKVCKMAHIYDFLCEHEGLKTQVGEGALSLAAVKNSA

SEQ ID NO: 9655 - protein, 98 aa, Helicobacter pylori
  misc_feature (B) LOCATION 1...98
  hypothetical: YES
VCFILPFCLGVLGTQIFKQETPRQLPIVVVDLDKTTTSHQVAFELGATSAVEIKYQVTSLSEAKRFLNSAEVYGALILPKDLERKIKMGRKVXFALLL

SEQ ID NO: 9656 - protein, 92 aa, Helicobacter pylori
  misc_feature (B) LOCATION 1...92
  hypothetical: YES
MFDSIVYFFNKSGFVTTLVLVWISLYLVMTLWVFLYKSIVLKIELRREMQSLSNILNGAQDAPEHFMFNKKRNDETKRYSNELLQDLETPGS

SEQ ID NO: 9657 - protein, 149 aa, Helicobacter pylori
  misc_feature (B) LOCATION 1...149
  hypothetical: YES
MEFYQVYDPLGHIWLSALVALSPIALFFISLIVFKLKGYSAGFLSLALSILIALFVYKMPVQMVSASFFYGFLYGLWPIAWIVIAAIFLYNLSVKSGYFEILKESILSLTPDHRILVILIGFCFGSFLXGAXGFGGPVAITAAILVALG

SEQ ID NO: 9658 - protein, 73 aa, Helicobacter pylori
  misc_feature (B) LOCATION 1...73
  hypothetical: YES
VGIIRGIIHRPELILLDEPFSALDSLNRKNLQDLIKEIHQNSCATFIMVTHDENEAQKLATKTLEIKALKQEQ

SEQ ID NO: 9659 - protein, 191 aa, Helicobacter pylori
  misc_feature (B) LOCATION 1...191
  hypothetical: YES
MGLMGVSQGLPNTTSKFGIEFDSLADVVAFGVAPSLITYFYVGYNFGRIGMAVSALFVIFGAIRLARFNISTNTSDPYSFIGIPIPAAAVLVVLCVLLDNKYHFLEGNTEKLFLGFIVLLGVLMVSNIRYPNFKKVKWNLKLFILVLIFLSLVFVRPLEALSVFMGLYLIYGIIRWIFLMVKITFNKNKSA

SEQ ID NO: 9660 - protein, 81 aa, Helicobacter pylori
  misc_feature (B) LOCATION 1...81
  hypothetical: YES
MSVNLLELLKLAVPLAVILSVQVAVMILYVVLVTFRVCGKDYDAAVLCAGHCGFGLGATPTAMVNMQTITNHYGPSHVAFI

SEQ ID NO: 9661 - protein, 153 aa, Helicobacter pylori
  misc_feature (B) LOCATION 1...153
  hypothetical: YES
MQNLPGMARAAMLTTSSAPAPEGEGAFRAMKMASEMAKVEVGYVNAHGTSTHYNDWYESIALKNVLALKKKSLLLAPLKGRLGLLGCCGVRSRYSIMAMXQGILPPTINQETPDPECXLDYIPNTAREKQVNAVMSNSFGFGGTNGVVIFKKA

SEQ ID NO: 9662 - protein, 198 aa, Helicobacter pylori
  misc_feature (B) LOCATION 1...198
  hypothetical: YES
MKESFYIEGMTCTACSSGIERSLGRKSFVKKIEVSLLNKSANIEFNENETNLDEIFKLIEKLGYSPKKTLAEEKKEFFSPNVKLALAVIFTLFVVYLSMGAMLSPSLLPESLLTINHHSNFLNACLQLIGALIVMHLGRDFYIQGFKALWHRQPNMSSLIAIGTSAALISACGNCIWFIPIIIPISGLMGIIILKACA

SEQ ID NO: 9663 - protein, 75 aa, Helicobacter pylori
  misc_feature (B) LOCATION 1...75
  hypothetical: YES
VGSLKFLNAMGVDLKVKESANIMVGFAKNKTLCALFILEERLKANAKEVIQALQNQGLELEILSGDNESSVKECA

SEQ ID NO: 9664 - protein, 79 aa, Helicobacter pylori
  misc_feature (B) LOCATION 1...79
  hypothetical: YES
VNVGVPFSYQVSATFQNSRLSSLLETLKKSFLEKPLIESSANKIADIFSKAVLFLAFVSFLLWQFGLGGNFEKSFNGVY

SEQ ID NO: 9665 - protein, 67 aa, Helicobacter pylori
  misc_feature (B) LOCATION 1...67
  hypothetical: YES
MIAVLPPLFSMGSFDEWIYRGLVALMVSCPCALVISVPLGYFGGVGAASRKGILMKGVHVLEGAYPN

SEQ ID NO: 9666 - protein, 81 aa, Helicobacter pylori
  misc_feature (B) LOCATION 1...81
  hypothetical: YES
LSKQSADIVITNDSLSSLVKVLAIAKKTKSITWQNILFALGIKAVFIVLGLMGVASLWEAVFGDVGVTLLALANSXRTMRA

SEQ ID NO: 9667 - protein, 12 aa, Helicobacter pylori
  misc_feature (B) LOCATION 1...12
  hypothetical: YES
VVILGSHGKEEY

SEQ ID NO: 9668 - protein, 93 aa, Helicobacter pylori
  misc_feature (B) LOCATION 1...93
  hypothetical: YES
LYPPGSVVKMGVGLSFLENLHITENTTIPTPPFIEVGKRKFRDWKKTGHGNSNLYKAIRESVDVYFYKFGLEISIEXLSKXFKXSGLWGKNGR

SEQ ID NO: 9669 - protein, 110 aa, Helicobacter pylori
  misc_feature (B) LOCATION 1...110
  hypothetical: YES
VEKIKPYAPKDSPLIDYSSLVRNVQSTLKGTSFETLINGVWESFETKVLGEFNAYNIASAILTAKHLGLETERIKRLVFELKPINHRLQLLEANQKIIIDDNFNGNLKGM

SEQ ID NO: 9670 - protein, 138 aa, Helicobacter pylori
  misc_feature (B) LOCATION 1...138
  hypothetical: YES
MALDKRIWMHFDLLPFVFIIPLLVVSFLLIFESSAVLSLKQGVYYAIGFLLFWVVFFIPFRKLDRWLFALYWACVILLALVDFMGSSKLGAQRWLVIPFTSITLQPSEPVKNRXSFIVGAFXXNXPDXLLRAMIGACF

SEQ ID NO: 9671 - protein, 447 aa, Helicobacter pylori
  misc_feature (B) LOCATION 1...447
  hypothetical: YES
MLKKIFYGFIVLFLIIVGLLAVLVAQVWVTTDKDIAKIKDYRPSVASQILDRKGRLIANIYDKEFRFYARFEEIPPRFVESLLAVEDTLFFEHGGINLDAVMRAMIKNAKSGRYTEGGSTLTQQLVKNMVLTREKTLTRKLKEAIISIRIEKVLSKEEILERYLNQTFFGHGYYGVKTASLGYFKKPLDKLTLKEITMLVALPRAPSFYDPTKNLEFSLSRANDILRRLYSLGXISSNELKSALNEVPIVYNQTSTQNIAPYVVDEVLKQLDQLDGLKTQGYTIKLTIDLDYQRLALESLRFGHQKILEKIAKEKPKTNASNDKDEDNLNASMIVTETSTGKILALVGGIDYKKSAFNRATQAKRQFGSAIKPFVYQIAFDNGYSTTSKIPDTARNFENGNYSKNSVQNHAWHPSNYXRKFLGLVTLQEALSHSLNLATINLAIAWL

SEQ ID NO: 9672 - protein, 76 aa, Helicobacter pylori
  misc_feature (B) LOCATION 1...76
  hypothetical: YES
MKKTTLFVLGLLFNSSLSAVDGISQTEPSSLNLAEDSLPLNHSNAQKLSLKNAWNRVLSNHEGLHAQNTPLSERVK

SEQ ID NO: 9673 - protein, 131 aa, Helicobacter pylori
  misc_feature (B) LOCATION 1...131
  hypothetical: YES
VHDGVLGWVGFTLIASMYHMTPRLFKREIYSGRLVDFQFWIMTLGIVLYFSSMWIAGITQGMMWRDVDQYGNLTYQFIDTVKALIPYYNIRGVGGLMYFIGFIIFAYNIFMTITAGKKLEREPNYATPMAK

SEQ ID NO: 9674 - protein, 293 aa, Helicobacter pylori
  misc_feature (B) LOCATION 1...293
  hypothetical: YES
LLLFIVVITSLVKNTIPNIWLTKILYMAILLCAIAHSVGXILRWYVSGHSPWSNAYESMFYIAWASVIAGFVLRXKLALSASSFLAGIALFVAHLGFMDPQIGPLVPVLKSYWLNIHVSVITASYGFLGLCFVLGILSLVLFILRKQGRFNLDKTILSISAINEMSMILGLFMLTAGNFLGGVWANESWGRYWGWDPKETWALISICVYALILHLRFLGSQNWPFILASSSVLGFYSVLMTLFWRELLPFWLAQLCRRXSFADPYFFILFGSDTFRSRILAYFKRHLSLPKLV

SEQ ID NO: 9675 - protein, 237 aa, Helicobacter pylori
  misc_feature (B) LOCATION 1...237
  hypothetical: YES
VFTMLVLVLSDNFLGLFIGWEGVGLCSYLLIGFWYHKKSANNASIEAFVMNRITDLGMLMGIILIFWNFGTLQYKEVFSMLNNADYSMLFYISVFLFIGAMGKSAQFPMHTWLANAMEGPTPVSALIHATTMVTAGVYLIIRANPLYSAVFEVGYFIACLGAFVALFGASMALVNKDLKRIVEYSTLSQLGLYVCSGRAWGLCDRAFPPLYACVLQIPPFLRLRQCHACDGRQSGYY

SEQ ID NO: 9676 - protein, 65 aa, Helicobacter pylori
  misc_feature (B) LOCATION 1...65
  hypothetical: YES
MLRLLAQKSAIKLILIPPSANALGIASICELSEEVFEHEKIVGIRAQGDFTINSDDRGFWERRCQ

SEQ ID NO: 9677 - protein, 124 aa, Helicobacter pylori
  misc_feature (B) LOCATION 1...124
  hypothetical: YES
VMALLKISVVVPEGEVYTGEVKSVVLPGVEGEFGVLYGHSNMITLLQAGVVEIETENQKEHIAINWGYAEVTNERVDILADGAVFIKKGSDDRDDAISRAKKLLEDASSDRLAVSSVLAKIESL

SEQ ID NO: 9678 - protein, 162 aa, Helicobacter pylori
  misc_feature (B) LOCATION 1...162
  hypothetical: YES
MGSYTFPLILKPIFINKVPVTIDFYANANYFLIYGALANAVVGSINALNDEIRFKRNAQIEEAELGTDGIKIKPIALYNPSEGYLNYALSSVFIFILHQVMLIASSMFTSSRRLELALLDKKQIALRLCARLLVFMGAFSVFVLWYFGALFSFYGIERHGSA

SEQ ID NO: 9679 - protein, 84 aa, Helicobacter pylori
  misc_feature (B) LOCATION 1...84
  hypothetical: YES
MRXEKIMTNFEKXIAQNRLKTNAVLTTYCAIFAFIGLLVDAIRINANDLGIALFKLMTFQIFPTXTIVMFVVAFVIXXSLYPKF

SEQ ID NO: 9680 - protein, 313 aa, Helicobacter pylori
  misc_feature (B) LOCATION 1...313
  hypothetical: YES
VQPMKSKKLYLALIIGVLLAFLTLSSWLGNSGLVGRFGVWFAAINKKYFGYLSLINLPYLAWVLFLLYRAKNPFTEIVLEKTLGHLLGILSLLFLQSSLLNQGEIGNSARLFLHPFIGDFGLYVLIMLMVVISYLILFKLPPKSVFYPYMNKTQSLLKEIYKQCLQAFSPNFSLKKEGFENTPSDSQKKETNNDKEKENLKENPIDENHNTPNEESFLAIPTPYNTTLNNSEPQEGLVQISPHPPTHYTIYPKRNRFDDLTNPTLKEPKQETKEREPTLKKETPTTLKPIMPISASTQKIMTKQKTTKPLTTP

SEQ ID NO: 9681 - protein, 58 aa, Helicobacter pylori
  misc_feature (B) LOCATION 1...58
  hypothetical: YES
VIMTKLDGTSKGGAILXVLYELKLPILYLGMGEKEDDLIAFDEERFIEDLVDAVFVEQ

SEQ ID NO: 9682 - protein, 192 aa, Helicobacter pylori
  misc_feature (B) LOCATION 1...192
  hypothetical: YES
MMDKVGFKSQGIFVMDASKRDGRLNAYFGGLGKNKRVVLFDTLISKVGTEXLLAILGHELGHFKNKDLLKNLGIMGGLLALVFALIAHLPPLVFEGFNVSQTPASLITILLLFLPVFSFYAMPLIGFFSRKNEYNADKFGASLSSKETLAKALVSIVNENKAFPYSHPFYVFLHFTHPPLLERLKALDYEIE

SEQ ID NO: 9683 - protein, 78 aa, Helicobacter pylori
  misc_feature (B) LOCATION 1...78
  hypothetical: YES
VYALMVAFFAYMSYCLGYQFSKFVSKNNISSLSSLLSSCVRVVSVLILSLSSLELRYFSPLTIITMHFALTLIILFFF

SEQ ID NO: 9684 - protein, 201 aa, Helicobacter pylori
  misc_feature (B) LOCATION 1...201
  hypothetical: YES
MNIYQKNLQALFKKDPLLFAKLKAIKENKKYEVFLGNDSANFNLLDKETNTPLFEKSPLDSSLELYKNSEIHMLYPYLYYFGLGNGVFYRLLLGNENLKRLVVIEPEIEVIFIVLNLLDFSTEILENRLILLHASFCNYNMIASLFDMDKKSRLYARMYDLKLFNAYYERYSHQMIEINQHFTRALEHGAISVGNDAKAHS

SEQ ID NO: 9685 - protein, 141 aa, Helicobacter pylori
  misc_feature (B) LOCATION 1...141
  hypothetical: YES
MWPXKLFLKPLKETSLALVGVAKNIKIVALKAGLKRAYLPNRSLIFFLIKRYLRFDKSQPFISITALLAFFGVAVGVMVLIVAMAIMNGMSKEFEKKLFVMNYPLTLYTTSPYGISEEVVQALEKKFPNLPFSXPICKPKA

SEQ ID NO: 9686 - protein, 127 aa, Helicobacter pylori
  misc_feature (B) LOCATION 1...127
  hypothetical: YES
VLLLSRMGIAFAHSIFWSITASLVIRVAPRNKKQQALGLLALGSSLAMILGLPLGRIIGQILDWRSTFGVIGGVATLIMLLMWKLLPHLPSRNAGTLASVPILMKRPLLVGIYLHVNHGYFWAFHHL

SEQ ID NO: 9687 - protein, 138 aa, Helicobacter pylori
  misc_feature (B) LOCATION 1...138
  hypothetical: YES
LWRTPKTPLVIKPYLKSMSDSEIFAXXCVGMASVXGPVLAGYASMGIPLPYLIAASFMSAPGGLLFAKTIYPQNETISSHADVSAEEHVNIIEAXAXGASTGXHLALHVGAMLLAFVGMVALVNGLLGVVGGFLGMEH

SEQ ID NO: 9688 - protein, 259 aa, Helicobacter pylori
  misc_feature (B) LOCATION 1...259
  hypothetical: YES
MILALLISKEKTHLEALYYLSYGVLLGGVAQILLHFYPLVKLGLWDLLFKGLLGFKTKNTNKKEYRLNRAKKDLKAFFKQFFPSVLGNSSAQIASFLDTTIASFLASGSVSYLYYANRVFQLPLALFAIAISTALFPSIAIALKNNQQDLILQRLQKAWFFLVGVLLLCSIGGIMLSKEITELLFERGQFSPKDTLITSQVFSLYLLGLLPFGLTKLFSLWLYAKLEQKKAAKISLISLFLGLAASLSLMPLLGVLGLR

SEQ ID NO: 9689 - protein, 94 aa, Helicobacter pylori
  misc_feature (B) LOCATION 1...94
  hypothetical: YES
VLISVMIGQNQVLGFIGTNFKQELVVDFIVPSAEINIGNQVITSGLDGIFGAGVFVGEVSSVEDHYTYKSAVLKNAFLSEAKLLRHVFLSGVKN

SEQ ID NO: 9690 - protein, 79 aa, Helicobacter pylori
  misc_feature (B) LOCATION 1...79
  hypothetical: YES
VMVYKLPKHQQNKVMILGLGLAMITRIGLLGSLFFISHLQKPLFAIAGMSFSWRDVVLLLGGAFLAFKALVELKRADLS

SEQ ID NO: 9691 - protein, 191 aa, Helicobacter pylori
  misc_feature (B) LOCATION 1...191
  hypothetical: YES
MKNPQANVLKLFLNQVADQKYIDMNDEKNYDPREPEPPYGTKGALDEIIRTDARSWANTPDDEFGSIMSSFKRFMYVYKDPKVREATSKMSFDYEELRTGNISIYIVIAQIDIGTLSSLVRAFLESIAKNLMVKESSKPEERIFIIADEFVRFGKLPFLLEMPALCRSYNVVPLFITQDYAMIRNTIAMMI

SEQ ID NO: 9692 - protein, 73 aa, Helicobacter pylori
  misc_feature (B) LOCATION 1...73
  hypothetical: YES
VGGLAMLGFFYNIEKISLATATAFSQCAPXYTVLLSPLLLKEKLKRSALISACIGLVGVVLISDPSVENVGPS

SEQ ID NO: 9693 - protein, 111 aa, Helicobacter pylori
  misc_feature (B) LOCATION 1...111
  hypothetical: YES
MAGLVLMVLLASYESFVSKLDKVDASEITWLKHTDFNALKLKVSLSIVAISAIFLLKRYMSLEDVLSSIPKDTPLSHNPIFWQVVIHLVFVCSALLTAVTNNIAFSQKERH

SEQ ID NO: 9694 - protein, 90 aa, Helicobacter pylori
  misc_feature (B) LOCATION 1...90
  hypothetical: YES
MVKHYLFMAVSQVFFSFFLVLFFISSIVLLISIASVTLVIKVSFLDLVQLFLYSLPGTIFFILPITFFAAXRLGXSRLSYDHELLVFFLX

SEQ ID NO: 9695 - protein, 134 aa, Helicobacter pylori
  misc_feature (B) LOCATION 1...134
  hypothetical: YES
VVADEVRNLAGRTQKSLAEINSTIMVIVQEINDVSSQMNLNSQKMERLSDMSKSVQETYEKMSSNLSSVVLDSNQSMDDYAKSGHQIEAMVSDFAEVEKVASKTLADSSDILNIATHVSGTTMNLXKQVNLFKT

SEQ ID NO: 9696 - protein, 203 aa, Helicobacter pylori
  misc_feature (B) LOCATION 1...203
  hypothetical: YES
MQAWVDKPVLLEPDSNAQYAAVIEIDVAEITEPILACPNDPDDVATLSEVLADTTGKRPHAIDEVFIGSCMTNIGHFRAFGEIVKNAPPSQARLWVVPPSKMDEQELINEGYYAIFGAAGARTEVPGCSLCMGNQARVRDNAVVFSTSTRNFDNRMGRGAKVYLGSAELGAACALLGRIPTKEEYMNLVSEKLESQKDKIYRS

SEQ ID NO: 9697 - protein, 209 aa, Helicobacter pylori
  misc_feature (B) LOCATION 1...209
  hypothetical: YES
MNALKRACLRLMGETNTDDLXPXSDAFTRSDIPLHAKAMLKNRIENYEQRIEAIKTKGVPVAYVGDVVGTGSSRKSATNSIMWHFGKDIPFVPNKRSGGIVIGGVIAPIFFATCEDSGALPIVADVKDLKEGDIIKIYPYKGEITLNDKVVSTFKLEPETLLDEVRASGRIPLIIGRGLTNKARKFLGRRIGSVQKTFRPSSALRLHFA

SEQ ID NO: 9698 - protein, 54 aa, Helicobacter pylori
  misc_feature (B) LOCATION 1...54
  hypothetical: YES
MNKPFLILLIALIAFSGCNMRKYFKPAKHQIKAKRISLTICKKASFRLIVMEPF

SEQ ID NO: 9699 - protein, 129 aa, Helicobacter pylori
  misc_feature (B) LOCATION 1...129
  hypothetical: YES
VIQSHPKQTLIEDENYFYANKGLYKTNKEAFLRVYKIPESMPIEKRESLSKVSKIFLALLFFISSMLFGIFWRLPKRLDTKMSLESAHKNELENAFQRYDALGVRFEDIAGVNEVKEELLEVIDYLKKP

SEQ ID NO: 9700 - protein, 119 aa, Helicobacter pylori
  misc_feature (B) LOCATION 1...119
  hypothetical: YES
LALRLPFLIAHVINMFLFYLIGRKILKKPKDALYVVLTYALLPGVNLFAILLAKSVLVLSLGLLISYLYIKTQKIPYLTLSACAFLDGAFIPLLLGVFAYALRKTAILRARSLLWWFXL

SEQ ID NO: 9701 - protein, 201 aa, Helicobacter pylori
  misc_feature (B) LOCATION 1...201
  hypothetical: YES
MNTSKKLGNPLLFLHDNKILLFVVGVSMGGWATSKIYQFESALEPIHFKFARKLSLSPFLNLSHLVRNKPLNTTDGGFMLPLYHELATQYPLLLKFDQQNNPRELLRPNTLNHQLQPSLTPFKDCAVMAFRNHSFKDSLMLETCKTPTDWQKPISTNLKNLDDSLNLLNLNGILYLIHNPSDLSLRRKELWLSKLENQQLI

SEQ ID NO: 9702 - protein, 192 aa, Helicobacter pylori
  misc_feature (B) LOCATION 1...192
  hypothetical: YES
MKSTRIGSKIVMMVCAVVIVISAVMGVIISYKVESVLQSQATELLQKKAQLVSFKIQGIMKRIFMGANTLERFLSDENGAINDTLKRRMLSEFLLANPHVLLVSAIYTNNNERMITAMNMDSKIAYPNTALNENMTXPIHSLKSITRSXPYYKEVNXXKIYXXXITLPLXXKNXNXIXXLNFXLNIDXFLYX

SEQ ID NO: 9703 - protein, 226 aa, Helicobacter pylori
  misc_feature (B) LOCATION 1...226
  hypothetical: YES
MKTPCNAYFLKTPPKNKKRRVYVNLAVFLFLLLASALWLIPRSAIEXKPLVVATKPSSEQYILGEILSLLLEKHHIPIKRAFGIGGGTMNIHPALIRGDFDLYVEYTGTAWVNTLKNPLTQKVDFETIKKRYEKEFNLLWVGLLGFNNTYSLAISKEDAQKYAIETFSDLAFHSPNFDFGAEXDFFEREDAFKGLIKAYRFHFRSLHEMXINLRYKSFESLIRXTL

SEQ ID NO: 9704 - protein, 146 aa, Helicobacter pylori
  misc_feature (B) LOCATION 1...146
  hypothetical: YES
MSSGLIYISLEVLVXCLITALIMYYVMKKIYYARGQAILKGASAKAKLMEFQAKSFVEAEEMRMKSQECKLQQQYENKNLQLQTHFDKKEAHLKHLEAQHKEFVRDEKRYLEKEKKELEKERQILEXERENFXXQRAFVXXXXAKA

SEQ ID NO: 9705 - protein, 72 aa, Helicobacter pylori
  misc_feature (B) LOCATION 1...72
  hypothetical: YES
MANMMMAAAMLGIDSCPIEGYDQEKVEAYLEEKGYLNTAEFGVSVMASFGYRNQEITPKTRWKTEVIYEVIE

SEQ ID NO: 9706 - protein, 300 aa, Helicobacter pylori
  misc_feature (B) LOCATION 1...300
  hypothetical: YES
VILIFIIVVEDQKGIFPIAASKRKSQSSVIIEDVCFSKEDFVEGAKAIEGLLKKHGFKDNGIIFGHALSGNLHFVVTPILENEAERKAFENLVSEMFLMVSKSSGSIKAEHGTGRMVAPFVEMEWGEKAYKIHKQIKELFDPNGLLNPDVIITNDKEIHTKNLKSIYPIEEHLDMCMECGFCERICPSKDLSLTPRQRIVIHREVERLKERVSHGHDEDQVLLDELLKESEYLAHATCAVCHMCSTLCPLGIDTGXIALNHYQKNPKGEKIASKILKSHANDHKRGSFFFKXRFRGFKNS

SEQ ID NO: 9707 - protein, 64 aa, Helicobacter pylori
  misc_feature (B) LOCATION 1...64
  hypothetical: YES
VYDKSLCKTMALALKALGVKRAMVVNGGGTGEIVLHDITHACELKNNEILEYDLSAKDFDLPPS

SEQ ID NO: 9708 - protein, 104 aa, Helicobacter pylori
  misc_feature (B) LOCATION 1...104
  hypothetical: YES
VAKNLVASGVCDKATVQLAYAIGVIEPVSIYVNTHNTSKHSSAELEKCVKSVFKLTPKGIIESLDLLRPIYSLTSAYGHFGRELEEFTWEKTNKVEEIKAFFKR

SEQ ID NO: 9709 - protein, 72 aa, Helicobacter pylori
  misc_feature (B) LOCATION 1...72
  hypothetical: YES
VGYIPXEKIVGISAIAKLIEIYSKRLQIQERLTTQIAETFDEIIEPRGVIVVCEAKPLVHEHARGAKAKCDH

SEQ ID NO: 9710 - protein, 54 aa, Helicobacter pylori
  misc_feature (B) LOCATION 1...54
  hypothetical: YES
MIYLGKKNFNALLKGAYLMDEHFRNAPFESNLPVLMGLIWRVVYLTFFPIQKAT

SEQ ID NO: 9711 - protein, 95 aa, Helicobacter pylori
  misc_feature (B) LOCATION 1...95
  hypothetical: YES
MDISIFREYDIRGIYPTTLDENTAFSIGVELGKIMREYDKSVFVGHDARVHGRFLFEVLSAGLQSSGLKVYDLGLIPTPVAYFAAFNEIDNIQWP

SEQ ID NO: 9712 - protein, 188 aa, Helicobacter pylori
  misc_feature (B) LOCATION 1...188
  hypothetical: YES
MKSIGEVMAIGGNFLEALQKALCSLENNWLGFESLSKDLEAIKKEIRRPNPKRLLYIADAFRLGVSVDEVFELCQIDRWFLSQIQKLVKAEEGINSSVLTDAKKLRGLKNLGFSDARIATKIKENENLEVSPFEVELARSNLQIAPHFEEVDTCAAEFLSLTLICIPPMPLTLCPLLETNKKNKKRKS

SEQ ID NO: 9713 - protein, 277 aa, Helicobacter pylori
  misc_feature (B) LOCATION 1...277
  hypothetical: YES
VKITIMIKDFNHYCRKITRGFVKIPTKKQGAKKMKKAGFLFLAAMAIIVVSLNAKDPNVLRKIVFEKCLPNYEKNQNPSPCIEVKPDAGYVVLKDINGPLQYLLMPTTHISGIENPLLLDPSTPNFFYLSWQARDFMSXKYGKPIPDYAISLTINSKKGRSQNHFHIHISCISLDVRKQLDNNLKNINSRWSPLSGGLNGHKYLARRVTESELAQKSPFVMLAKEVPNAHKRMGDYGLAVVQQSDNSFVLLATQFNPLTLNRASAEEIQDHECAILR

SEQ ID NO: 9714 - protein, 118 aa, Helicobacter pylori
  misc_feature (B) LOCATION 1...118
  hypothetical: YES
MVALSNALSRVFGSVAGYKFPSFIQKSINALYVKIFKIDLSEFEPLENYKSLNALFMRSLKKERPFDKAPIFALRLAMALITECAFLDNDSALQIKGMPYKAHELVGEINPLSPLFSM

SEQ ID NO: 9715 - protein, 142 aa, Helicobacter pylori
  misc_feature (B) LOCATION 1...142
  hypothetical: YES
MAFWQAIRWWILKLPFMMGATMMWILSEMAFKIAGXMAFKEASRAANPVLLEPMMKVEVEVPEEYMGDVIGDLNRRRGQINSMDDRLGLKIVNAFVPLVEMFGYSTDLRSATQGRGTYSMEFDHYGEVPSNIAKEIVEKRKG

SEQ ID NO: 9716 - protein, 121 aa, Helicobacter pylori
  misc_feature (B) LOCATION 1...121
  hypothetical: YES
MEALNALNAQSDEQILCEGYFVLLQILEPMIPHTAWELSERLFKRENFKPIEVDESALIEDFMTLGLTINGKRRAELKVNINASKEEIIILAKKELEKYLENASVKKEIYVPNKLVNFVTA

SEQ ID NO: 9717 - protein, 88 aa, Helicobacter pylori
  misc_feature (B) LOCATION 1...88
  hypothetical: YES
MSLPPVCILKDVNHLLQVLHSLVALGNSMLVIEHNLDIIKNADYIIDMGPDGGDKGGKVIASGTPLEVAQNCEKTQSYTGKFLALELK

SEQ ID NO: 9718 - protein, 13 aa, Helicobacter pylori
  misc_feature (B) LOCATION 1...13
  hypothetical: YES
VALVFDSLIENKK

SEQ ID NO: 9719 - protein, 173 aa, Helicobacter pylori
  misc_feature (B) LOCATION 1...173
  hypothetical: YES
MGFEKSILDNLNGAQKIVACHIQGPLLILAGAGSGKTKTLTSRLAYLIGACGVPSENTLTLTFTNKASKEMQERALKLLKNQALIPPLLCTFHRFGLLFLRQHMNLLKRACDFSVLDSDEVKTLCKQLKISNFRASISQIKNGMMDLSVQDSECYKAYELYQNALKKDNLVEF

SEQ ID NO: 9720 - protein, 93 aa, Helicobacter pylori
  misc_feature (B) LOCATION 1...93
  hypothetical: YES
VLKTLSIRLVILLNCSLATNACSGVQKLRDESHRYAINFHRSTKLKNMKQIALLKEKGIGEASVKKLLDYFGSFEAIEKASDQEKNAVLKKRK

SEQ ID NO: 9721 - protein, 66 aa, Helicobacter pylori
  misc_feature (B) LOCATION 1...66
  hypothetical: YES
VCGAHGKSSITXMLSAICPAFGXIIGRHSKEFDSNVXESADMSLVFEXDESDSSFFIFQPFLRDCA

SEQ ID NO: 9722 - protein, 187 aa, Helicobacter pylori
  misc_feature (B) LOCATION 1...187
  hypothetical: YES
MRILHYGGELPCDCPKRIAGLDFALKILTNITSDHLDFHQNIENYRDAKNSFFKDEGLKVINRDETNALFNPINARTYALDKKAHLNVQAFSLNPSISASLCYQHDLRDPNLKETALIHSPLLGRYNLYNILAGVLGVKLLTQLPLETIAPLLENFYGVKGRLEIVHSKPLVVVDFAHTTDGMQQVF

SEQ ID NO: 9723 - protein, 193 aa, Helicobacter pylori
  misc_feature (B) LOCATION 1...193
  hypothetical: YES
VGSFLFVGPSGVGKTELAKELALNLXLHFERFDMSEYKEAHSVAKLIGSPSGYVGFEQGGLLVNAIKKHPHCLLLLDEIEKAHPNVYDLLLQVMXNATLSDNLGNKASFKHVILIMTXXVGSKDKDTLGFFSTKNAKYDRAVKELLTPELRSRIDAIVPFNALSLEDFETHCFCGIGRVKSPSTRARRDLKIP

SEQ ID NO: 9724 - protein, 92 aa, Helicobacter pylori
  misc_feature (B) LOCATION 1...92
  hypothetical: YES
VEKAHPDVFNLLLQVLDEGHLTDSKGVRVDFKNTILILTSNVASGALLEEDLSEADKQKAIKESLRQFFKPEFLNRLDEIISFNALDSHAII

SEQ ID NO: 9725 - protein, 280 aa, Helicobacter pylori; identical to SEQ ID NO: 8837
  misc_feature (B) LOCATION 1...280
  hypothetical: YES

SEQ ID NO: 9726 - protein, 172 aa, Helicobacter pylori
  misc_feature (B) LOCATION 1...172
  hypothetical: YES
MGKISAHLAHEIRNPVGSISLLASVLLKHANEKTKPIVVELQKALWRVERIIKATLLFSKGIQANRTKQSLKTLESDLKEALNCYTYSKDIDFLFNFSDEEGFFDFDLMGIVLQNFLYNAIDAIEALEESEQGQVKIEAFIQNEFIVFTIIDNGKEVENKSALFEPFETTKL

SEQ ID NO: 9727 - protein, 142 aa, Helicobacter pylori
  misc_feature (B) LOCATION 1...142
  hypothetical: YES
MITIVIAKAGNIVKXDIFTHISDIKMGLIKGGQWGVIGLGNIGKRVAKLAQAFGAKVVYFSPKDKKEEYERLSLEELLKTSGIISIHAPLNESTRDLIALKELQSLKDGAILINVGRGGIVNEKXLAXXLETTDLYYASDVF

SEQ ID NO: 9728 - protein, 99 aa, Helicobacter pylori
  misc_feature (B) LOCATION 1...99
  hypothetical: YES
MKEQEWDLSALFENKESAEEFLKTLQTEVQEFENAYQNNLKNLDAAKFANTLKHYENLSEKISRAMAYANYFLPRTLKKRSFIRNANGLCKYPTTPFIL

SEQ ID NO: 9729 - protein, 108 aa, Helicobacter pylori; identical to SEQ ID NO: 8146
  misc_feature (B) LOCATION 1...108
  hypothetical: YES

SEQ ID NO: 9730 - protein, 168 aa, Helicobacter pylori
  misc_feature (B) LOCATION 1...168
  hypothetical: YES
MLSSNDLFMVVLGAILLVLVCLVGYLYLKEKEFYHKMRRLEKTLDESYQENYLYSKRLRELEGRLEGLSLEKSAKEDSSLKTTLSHLYNQLQEIQKSMDKERDYLEEKIIXXKTXXKTWGIMPLAMKSTEKQVLKMYQEGYSVDSISKEFKVSKGEVEFILNMAGLKW

SEQ ID NO: 9731 - protein, 208 aa, Helicobacter pylori
  misc_feature (B) LOCATION 1...208
  hypothetical: YES
VVADEVRKLAEKTQKATKEIAVVVKSMQQEANDIQTNTHDINSIVGSIKGDVEELKSTVKNNMIVAQAAKYTIYNINNRVFCGXAKLDHVVFKNNLYGMVXLVSIPLTLPAHKSXRLGKWYYEGAGKENFANTSGYRALESHHASVHAEANDLVKAVQEDHVTDSKYLEHKVHLMEDSAKHVKENIDKMFYEKQDELNKIIEKIQKGE

SEQ ID NO: 9732 - protein, 377 aa, Helicobacter pylori
  misc_feature (B) LOCATION 1...377
  hypothetical: YES
LAQPVQVRTVFMSMTLNAMGQFAYNFPANISKDKQKLTMVYMDKDYGAYGNIVAMGGEYVKIELGTDTGLNPFAWAACVQKTNATMEQKQTAISVVKELVKNLATKSDEKDENGNSISFSLADSNTLAAAVTNLITGDMNLDYPITQLINAFGKDHNDPNGLVARLAPFCKSTNGEFQWLFDNKATDRLDFSKTIIGVDGSSFLDNNDVSPFICFYLFARIQEAMDGRRFVLDIDEAWKYLGDPKVAYFVRDMLKTARKRNAIVRLATQSITDLLACPIADTIREQCPTKIFLRNDGGNLSDYQRLANVTEKEFEIITKGLDRKILYKQDGSPSVIASFNLRGIPKEYLKILSTDTVFVKEIDKIIQNHSIIDKYQP

SEQ ID NO: 9733 - protein, 95 aa, Helicobacter pylori
  misc_feature (B) LOCATION 1...95
  hypothetical: YES
MGIATSLISEVSKFYYALKYHAKFMSLGELGCYASHYSLWQKCIELNEAICILEDDITLKEDFKEGLDFLEKHIQELGYARLMHLLYDASVKSEP

SEQ ID NO: 9734 - protein, 202 aa, Helicobacter pylori
  misc_feature (B) LOCATION 1...202
  hypothetical: YES
MKYLWLFLIYAIGLFATDKTLDIIKTIQKLPKIEVRYSIDNDANYALKLHEVLANDLKTSQHFDVSQNKEQGAINYAELKDKKVHLVALVSVAVENGNKISRLKLYDVDTGTLKKTFDYPIVSLDLYPFAAHNMAIVVNDYLKAPSIAWMKRLIVFSKYIGPGITNIALANYTMRYQKEIIKNNRLNIFPKWANAEQTEFYY

SEQ ID NO: 9735 - protein, 264 aa, Helicobacter pylori
  misc_feature (B) LOCATION 1...264
  hypothetical: YES
VGGASFISGGNGTLYGLNVGYDRLVKSVILGGYVAYGYSGFNGNIMHSLANNVDVGMYARAFLKRNEFTLSANETYGGNASHINSSNSLLSVLNQRYNYNTWTTSVNGNYGYDFMFKQKSVVLKPQVGLSYHFIGLSGMKGKMQNPAYQQFVMHSNPSNESVLTLNMGLESRKYFGKNSYYFVTARLGRDLLIKAKGDNVVRFVGENTLLYRKGEIFNTFASVITGGEMHLWRLMYVNAGVGLKMGLQYQDLNITGNVGMRVAF

SEQ ID NO: 9736 - protein, 177 aa, Helicobacter pylori
  misc_feature (B) LOCATION 1...177
  hypothetical: YES
MKKRKHVSKKVFNVIILFVAVFTLLVVIHKTLSNGIHIQNLKIGKLGISELYLKLNNKLSLEVERVDLSSFFHQKPTKKRLEVSDLIKNIRYGIWAVSYFEKLKVKEIILDDKNKANIFFDGNKYEXRISRNQRGIFPRRRLKISSLKSSICFLKMLKSKWMATPTIXPKPGKWRSI

SEQ ID NO: 9737 - protein, 86 aa, Helicobacter pylori
  misc_feature (B) LOCATION 1...86
  hypothetical: YES
MSKSAIFVLSGFLAFLLYALLLYGLLLERHNKEAEKILLDLNKKDEQAIDLNLEDLPSEKKNEKIKKVTEKQDDFLEPKRRTQRGA

SEQ ID NO: 9738 - protein, 106 aa, Helicobacter pylori
  misc_feature (B) LOCATION 1...106
  hypothetical: YES
MEVEHGKIETTLSLGASHLEVIKMMLLESLPSLVNNITITLISLIGYSAKAGALGAGGLGDLAIRIGYQSYRGDVLFYAVVVIIVLVQIIQSAGDYVVKRLRKNKY

SEQ ID NO: 9739 - protein, 242 aa, Helicobacter pylori
  misc_feature (B) LOCATION 1...242
  hypothetical: YES
VGLMKIRFMGRSVFVGDLERIEEVARFEEFWLLGGQKAIKEPRRLVLEIALKHQLNKLLKRVQKHFKEDELGIFKQMHDKKIQSVATNSIGRLFDIVAFSLGVVGTISFEAESGQVLENLALQSDEIAFYPFEIKNSVVRLKEFYQAFEKDLGVLEPKRIAKKFFNSLVEIITALIAPFKGHVVVCSGGVFCNQLLCEQLAKRLKKLQREYFFHKHFPPNDRSIPVGQALMAYFNPTIIKKG

SEQ ID NO: 9740 - protein, 78 aa, Helicobacter pylori
  misc_feature (B) LOCATION 1...78
  hypothetical: YES
VGGIVANMNDLSTYMVENLLMGLYLFSSALDLGVKKAINLASSCAYPKYAPNPLKESDLLNGSLEPTNEGYALPNSLX

SEQ ID NO: 9741 - protein, 176 aa, Helicobacter pylori
  misc_feature (B) LOCATION 1...176
  hypothetical: YES
MDLQQIDELENKFEEQEEQAQDTPLKQEPSTKEVKIPKKRGRKKSLLDEDKKKSFNIAFSPCVIKELNEFLLEFGSFKETRSTFIEEALIRHLKHRKNTQEQKLLKQLERLQNKEKGIMKTMNLNEFFTHKIIYKDTPLKFKDTLEQEISQASLVEKLILANILANMVFAKISNEN

SEQ ID NO: 9742 - protein, 59 aa, Helicobacter pylori
  misc_feature (B) LOCATION 1...59
  hypothetical: YES
MAFILTTNLFIKSFTNSIRITGCIISPNVFFAYEFCALGFRKGGLILDNFSKFVSHRLQ

SEQ ID NO: 9743 - protein, 102 aa, Helicobacter pylori
  misc_feature (B) LOCATION 1...102
  hypothetical: YES
MHYQLTSFNIIQDLFITCHVLRIKMRVFVCFLGVFVSNGLARFGYVVLIPLLILSGSLTPHQSFQLGIAVLMGYVFGSFLIQFLSPLMSLKSIAKISFKLTL

SEQ ID NO: 9744 - protein, 471 aa, Helicobacter pylori
  misc_feature (B) LOCATION 1...471
  hypothetical: YES
MRKFLDGAKSEVLKYDVISFDIFDTLLLRPFIKPTDLFLYIETKYNIKGFHQARILAEMQSRKLSKRQDITLDEIYHQIPKEFHSYKGVEIATEKEVLVPNLEMLELYRFAKENNKRVIIVSDMYLPLEVLEDILISKGFDGYTNFYLSNHIMLTKHSKDLFKHVLKQENITNTQILHIGDNSWADDAMPKSLGIATLFRKSVLKQLEEVFPKYKTFNPTSVAQSFILGSLCVFYKNYIQKHEKFDYWFLLGAMQAGIAAVAYCQFIYKEIHKRNIDTLVFVARDGYLLQKIFNILYPNSYKTTYVYAPRILKKAVFLEVVEGESLEILRILEGEEEVKKKQITTNQQAYVYLYSNFEHCRHLALKCLDNYRKYLFSSNLEGNIAIVDTITLGYSSQGLIQKALNKEVFGCYVDLLRILNYDCVSFLPFSHPKPVYFHNWDFMEFLLTSPEYPILNVENGVPILSKRRFIL

SEQ ID NO: 9745 - protein, 102 aa, Helicobacter pylori
  misc_feature (B) LOCATION 1...102
  hypothetical: YES
VCDIFSDGVLLDKALVIYFKAPYSFTGEDVCEIQCHGSPLLAQNILQACLNLGARLAKAGEFSKKAFLNHKMDLSEIEASVQLILCEDESVLNALARQLQGG

SEQ ID NO: 9746 - protein, 125 aa, Helicobacter pylori
  misc_feature (B) LOCATION 1...125
  hypothetical: YES
MAAWNTLVEKIIAPKHKVKIGFVGKYLSLKESYKSLIEALIHAGAHLDTQVNIEWLDSENFNEKTDLEGVDAILVPGGFGERGIEGKICAIQRARLEKLPFLGICLGMQLAIVEFCRKCFRLERG

SEQ ID NO: 9747 - protein, 268 aa, Helicobacter pylori
  misc_feature (B) LOCATION 1...268
  hypothetical: YES
VIFIATANNIDRIPAPLRDRMEFISVSSYTPSEKEEIAKNYLIPQELEKHALKPSEVDISHECLKLIIEKYTREAGVRDLRRQIATIMRKAALKYLEDNPHKKGRTKKSEDKDKKGGNEENEKRGESKDFCVSITPDNLKEYLERMVFEIXPIDEENKIGIVNGLAWTPVGGDVLKIEAVKIRGKGELKLTGSLGDVMKESAIIAFSVVKVLLDNETLKVPKIPSETDAENXKKKKVLKVXNAYDLHLHVPKGLRLKTARALGSLWRA

SEQ ID NO: 9748 - protein, 255 aa, Helicobacter pylori
  misc_feature (B) LOCATION 1...255
  hypothetical: YES
MKKRLNIGLVGLGCVGSTVAKILQENQEIIKDRAGVEIKIKKAVVRDVKKHKGYAFEISDDLESVIEDKGIDIVVELMGGVEAPYLLAKKTLAKQKAFVTANKAMLAYHRYELEQIAKNTPIGFEASVCGGIPIIKALKDGLSANHILSFKGILNGTSNYILSQMFKNQASFKDALKDAQHLGYAELNPEFDIKGIDAAHKLLILASLAYGIDAKLEEILIEGIEKIEPDDMEFAKEFGYSIKLLGIAKKHQGLH

SEQ ID NO: 9749 - DNA (genomic), 20 bp, Helicobacter pylori; double-stranded, circular
  misc_feature (B) LOCATION 1...20
  hypothetical: NO
  anti-sense: NO
tataccatggtgggcgctaa

SEQ ID NO: 9750 - DNA (genomic), 23 bp, Helicobacter pylori; double-stranded, circular
  misc_feature (B) LOCATION 1...23
  hypothetical: NO
  anti-sense: NO
atgaattcgagtaaggatttttg

SEQ ID NO: 9751 - DNA (genomic), 22 bp, Helicobacter pylori; double-stranded, circular
  misc_feature (B) LOCATION 1...22
  hypothetical: NO
  anti-sense: NO
ttaaccatggtgaaaagcgata

SEQ ID NO: 9752 - DNA (genomic), 23 bp, Helicobacter pylori; double-stranded, circular
  misc_feature (B) LOCATION 1...23
  hypothetical: NO
  anti-sense: NO
tagaattcgcataacgatcaatc

SEQ ID NO: 9753 - DNA (genomic), 22 bp, Helicobacter pylori; double-stranded, circular
  misc_feature (B) LOCATION 1...22
  hypothetical: NO
  anti-sense: NO
atatccatggtgagtttgatga

SEQ ID NO: 9754 - DNA (genomic), 25 bp, Helicobacter pylori; double-stranded, circular
  misc_feature (B) LOCATION 1...25
  hypothetical: NO
  anti-sense: NO
atgaattcaattttttattttgcca

SEQ ID NO: 9755 - DNA (genomic), 21 bp, Helicobacter pylori; double-stranded, circular
  misc_feature (B) LOCATION 1...21
  hypothetical: NO
  anti-sense: NO
aattccatggtgggggctatg

SEQ ID NO: 9756 - DNA (genomic), 23 bp, Helicobacter pylori; double-stranded, circular
  misc_feature (B) LOCATION 1...23
  hypothetical: NO
  anti-sense: NO
atgaattctcgatagccaaaatc

SEQ ID NO: 9757 - DNA (genomic), 25 bp, Helicobacter pylori; double-stranded, circular
  misc_feature (B) LOCATION 1...25
  hypothetical: NO
  anti-sense: NO
aattccatggtgcataacttccatt

SEQ ID NO: 9758 - DNA (genomic), 25 bp, Helicobacter pylori; double-stranded, circular
  misc_feature (B) LOCATION 1...25
  hypothetical: NO
  anti-sense: NO
aagaattctctagcatccaaatgga

SEQ ID NO: 9759 - DNA (genomic), 24 bp, Helicobacter pylori; double-stranded, circular
  misc_feature (B) LOCATION 1...24
  hypothetical: NO
  anti-sense: NO
atttccatggtcatgtctcatatt

SEQ ID NO: 9760 - DNA (genomic), 23 bp, Helicobacter pylori; double-stranded, circular
  misc_feature (B) LOCATION 1...23
  hypothetical: NO
  anti-sense: NO
atgaattccatcttttattccac

SEQ ID NO: 9761 - DNA (genomic), 27 bp, Helicobacter pylori; double-stranded, circular
  misc_feature (B) LOCATION 1...27
  hypothetical: NO
  anti-sense: NO
aaccatggtgattttaagcattgaaag

SEQ ID NO: 9762 - DNA (genomic), 28 bp, Helicobacter pylori; double-stranded, circular
  misc_feature (B) LOCATION 1...28
  hypothetical: NO
  anti-sense: NO
aagaattccactcaaaattttttaacag

SEQ ID NO: 9763 - DNA (genomic), 25 bp, Helicobacter pylori; double-stranded, circular
  misc_feature (B) LOCATION 1...25
  hypothetical: NO
  anti-sense: NO
gatcatccatatgttatcttctaat

SEQ ID NO: 9764 - DNA (genomic), 23 bp, Helicobacter pylori; double-stranded, circular
  misc_feature (B) LOCATION 1...23
  hypothetical: NO
  anti-sense: NO
tgaattcaaccattttaaccctg

SEQ ID NO: 9765 - DNA (genomic), 27 bp, Helicobacter pylori; double-stranded, circular
  misc_feature (B) LOCATION 1...27
  hypothetical: NO
  anti-sense: NO
tataccatggtgaaattttttctttta

SEQ ID NO: 9766 - DNA (genomic), 25 bp, Helicobacter pylori; double-stranded, circular
  misc_feature (B) LOCATION 1...25
  hypothetical: NO
  anti-sense: NO
agaattcaattgcgtcttgtaaaag

SEQ ID NO: 9767 - DNA (genomic), 24 bp, Helicobacter pylori; double-stranded, circular
  misc_feature (B) LOCATION 1...24
  hypothetical: NO
  anti-sense: NO
tataccatggtgatggacaaactc

SEQ ID NO: 9768 - DNA (genomic), 23 bp, Helicobacter pylori; double-stranded, circular
  misc_feature (B) LOCATION 1...23
  hypothetical: NO
  anti-sense: NO
atgaattcccacttggggcgata

SEQ ID NO: 9769 - DNA (genomic), 25 bp, Helicobacter pylori; double-stranded, circular
  misc_feature (B) LOCATION 1...25
  hypothetical: NO
  anti-sense: NO
ttatggatccaaaccaattaaaact

SEQ ID NO: 9770 - DNA (genomic), 23 bp, Helicobacter pylori; double-stranded, circular
  misc_feature (B) LOCATION 1...23
  hypothetical: NO
  anti-sense: NO
tatctcgagttatagagaagggc

SEQ ID NO: 9771 - DNA (genomic), 50 bp, Helicobacter pylori; double-stranded, circular
  misc_feature (B) LOCATION 1...50
  hypothetical: NO
  anti-sense: NO
cgcggatccatatggctgaaaaaacgcctttttttaaaactaaaaaccac

SEQ ID NO: 9772 - DNA (genomic), 34 bp, Helicobacter pylori; double-stranded, circular
  misc_feature (B) LOCATION 1...34
  hypothetical: NO
  anti-sense: NO
ccggaattcatcagtattcaatgggaataaagcc

SEQ ID NO: 9773 - DNA (genomic), 50 bp, Helicobacter pylori; double-stranded, circular
  misc_feature (B) LOCATION 1...50
  hypothetical: NO
  anti-sense: NO
cgcggatccatatgaaagaagaagaaaaagaagaaaaaaagacagaaagg

SEQ ID NO: 9774 - DNA (genomic), 37 bp, Helicobacter pylori; double-stranded, circular
  misc_feature (B) LOCATION 1...37
  hypothetical: NO
  anti-sense: NO
ccggaattcgcttaaaagaaaatagtcccccaaacgc

SEQ ID NO: 9775 - DNA (genomic), 43 bp, Helicobacter pylori; double-stranded, circular
  misc_feature (B) LOCATION 1...43
  hypothetical: NO
  anti-sense: NO
cgcggatccatatgaaagaggtcattcccaccccttcaacccc

SEQ ID NO: 9776 - DNA (genomic), 36 bp, Helicobacter pylori; double-stranded, circular
  misc_feature (B) LOCATION 1...36
  hypothetical: NO
  anti-sense: NO
ccggaattcatataaatatcatataggcagaaaaac

SEQ ID NO: 9777 - DNA (genomic), 37 bp, Helicobacter pylori; double-stranded, circular
  misc_feature (B) LOCATION 1...37
  hypothetical: NO
  anti-sense: NO
cgcggatccatatggaggcagagcttgatgaaaaatc

SEQ ID NO: 9778 - DNA (genomic), 36 bp, Helicobacter pylori; double-stranded, circular
  misc_feature (B) LOCATION 1...36
  hypothetical: NO
  anti-sense: NO
ccggaattcgattgattttgtcaaatctaaaatccc

SEQ ID NO: 9779 - DNA (genomic), 25 bp, Helicobacter pylori; double-stranded, circular
  misc_feature (B) LOCATION 1...25
  hypothetical: NO
  anti-sense: NO
tattatacatatggaagaagatggg

SEQ ID NO: 9780 - DNA (genomic), 23 bp, Helicobacter pylori; double-stranded, circular
  misc_feature (B) LOCATION 1...23
  hypothetical: NO
  anti-sense: NO
taatctcgagtttagaaggcgta

SEQ ID NO: 9781 - DNA (genomic), 25 bp, Helicobacter pylori; double-stranded, circular
  misc_feature (B) LOCATION 1...25
  hypothetical: NO
  anti-sense: NO
ttatattcatatggaagacgatggc

SEQ ID NO: 9782 - DNA (genomic), 24 bp, Helicobacter pylori; double-stranded, circular
  misc_feature (B) LOCATION 1...24
  hypothetical: NO
  anti-sense: NO
aattctcgagcctctttataagcc

SEQ ID NO: 9783 - DNA (genomic), 46 bp, Helicobacter pylori; double-stranded, circular
  misc_feature (B) LOCATION 1...46
  hypothetical: NO
  anti-sense: NO
cgcggatccatatggtagaagcctttcaaaaacaccaaaaagacgg

SEQ ID NO: 9784 - DNA (genomic), 32 bp, Helicobacter pylori; double-stranded, circular
  misc_feature (B) LOCATION 1...32
  hypothetical: NO
  anti-sense: NO
ccggaattcggagccaatagggagctaaagcc

SEQ ID NO: 9785 - DNA (genomic), 22 bp, Helicobacter pylori; double-stranded, circular
  misc_feature (B) LOCATION 1...22
  hypothetical: NO
  anti-sense: NO
ttaaccatggtgaaaagcgata

SEQ ID NO: 9786 - DNA (genomic), 24 bp, Helicobacter pylori; double-stranded, circular
  misc_feature (B) LOCATION 1...24
  hypothetical: NO
  anti-sense: NO
tagaattcgcctctaaaactttag

SEQ ID NO: 9787 - DNA (genomic), 22 bp, Helicobacter pylori; double-stranded, circular
  misc_feature (B) LOCATION 1...22
  hypothetical: NO
  anti-sense: NO
ttaaccatggtgaaaagcgata

SEQ ID NO: 9788 - DNA (genomic), 23 bp, Helicobacter pylori; double-stranded, circular
  misc_feature (B) LOCATION 1...23
  hypothetical: NO
  anti-sense: NO
tagaattcgcataacgatcaatc

SEQ ID NO: 9789 - DNA (genomic), 22 bp, Helicobacter pylori; double-stranded, circular
  misc_feature (B) LOCATION 1...22
  hypothetical: NO
  anti-sense: NO
atatccatggtgagtttgatga

SEQ ID NO: 9790 - DNA (genomic), 25 bp, Helicobacter pylori; double-stranded, circular
  misc_feature (B) LOCATION 1...25
  hypothetical: NO
  anti-sense: NO
atgaattcaattttttattttgcca

SEQ ID NO: 9791 - DNA (genomic), 23 bp, Helicobacter pylori; double-stranded, circular
  misc_feature (B) LOCATION 1...23
  hypothetical: NO
  anti-sense: NO
aattccatggctatccaaatccg

SEQ ID NO: 9792 - DNA (genomic), 25 bp, Helicobacter pylori; double-stranded, circular
  misc_feature (B) LOCATION 1...25
  hypothetical: NO
  anti-sense: NO
atgaattcgccaaaatcgtagtatt

SEQ ID NO: 9793 - DNA (genomic), 24 bp, Helicobacter pylori; double-stranded, circular
  misc_feature (B) LOCATION 1...24
  hypothetical: NO
  anti-sense: NO
gataccatggaatttatgaaaaag

SEQ ID NO: 9794 - DNA (genomic), 25 bp, Helicobacter pylori; double-stranded, circular
  misc_feature (B) LOCATION 1...25
  hypothetical: NO
  anti-sense: NO
tgaattcgaaaaagtgtagttatac

SEQ ID NO: 9795 - DNA (genomic), 19 bp, Helicobacter pylori; double-stranded, circular
  misc_feature (B) LOCATION 1...19
  hypothetical: NO
  anti-sense: NO
cccttcattttagaaatcg

SEQ ID NO: 9796 - DNA (genomic), 20 bp, Helicobacter pylori; double-stranded, circular
  misc_feature (B) LOCATION 1...20
  hypothetical: NO
  anti-sense: NO
atttcaaccaattcaatgcg

SEQ ID NO: 9797 - DNA (genomic), 20 bp, Helicobacter pylori; double-stranded, circular
  misc_feature (B) LOCATION 1...20
  hypothetical: NO
  anti-sense: NO
gccccttttgatttgaagct

SEQ ID NO: 9798 - DNA (genomic), 22 bp, Helicobacter pylori; double-stranded, circular
  misc_feature (B) LOCATION 1...22
  hypothetical: NO
  anti-sense: NO
tcgctccaagataccaagaagt

SEQ ID NO: 9799 - DNA (genomic), 22 bp, Helicobacter pylori; double-stranded, circular
  misc_feature (B) LOCATION 1...22
  hypothetical: NO
  anti-sense: NO
cttgaattaggggcaaagatcg

SEQ ID NO: 9800 - DNA (genomic), 22 bp, Helicobacter pylori; double-stranded, circular
  misc_feature (B) LOCATION 1...22
  hypothetical: NO
  anti-sense: NO
atgcgtttttacccaaagaagt

SEQ ID NO: 9801 - DNA (genomic), 22 bp, Helicobacter pylori; double-stranded, circular
  misc_feature (B) LOCATION 1...22
  hypothetical: NO
  anti-sense: NO
ataacgccacttccttattggt

SEQ ID NO: 9802 - DNA (genomic), 19 bp, Helicobacter pylori; double-stranded, circular
  misc_feature (B) LOCATION 1...19
  hypothetical: NO
  anti-sense: NO
ctttgggtaaaaacgcatc

SEQ ID NO: 9803 - DNA (genomic), 20 bp, Helicobacter pylori; double-stranded, circular
  misc_feature (B) LOCATION 1...20
  hypothetical: NO
  anti-sense: NO
cgatctttgatcctaattca

SEQ ID NO: 9804 - DNA (genomic), 19 bp, Helicobacter pylori; double-stranded, circular
  misc_feature (B) LOCATION 1...19
  hypothetical: NO
  anti-sense: NO
atcaagttgcctatgctga

SEQ ID NO: 9805 - DNA (genomic), 22 bp, Helicobacter pylori; double-stranded, circular
  misc_feature (B) LOCATION 1...22
  hypothetical: NO
  anti-sense: NO
ttgaacacttttgattatgcgg

SEQ ID NO: 9806 - DNA (genomic), 23 bp, Helicobacter pylori; double-stranded, circular
  misc_feature (B) LOCATION 1...23
  hypothetical: NO
  anti-sense: NO
ggattatgcgattgttttacaag

SEQ ID NO: 9807 - DNA (genomic), 21 bp, Helicobacter pylori; double-stranded, circular
  misc_feature (B) LOCATION 1...21
  hypothetical: NO
  anti-sense: NO
gtctttagcaaaaatggcgtc

SEQ ID NO: 9808 - DNA (genomic), 21 bp, Helicobacter pylori; double-stranded, circular
  misc_feature (B) LOCATION 1...21
  hypothetical: NO
  anti-sense: NO
aatgagcgtaagagagccttc

SEQ ID NO: 9809 - DNA (genomic), 18 bp, Helicobacter pylori; double-stranded, circular
  misc_feature (B) LOCATION 1...18
  hypothetical: NO
  anti-sense: NO
cttatgggggtattgtca

SEQ ID NO: 9810 - DNA (genomic), 18 bp, Helicobacter pylori; double-stranded, circular
  misc_feature (B) LOCATION 1...18
  hypothetical: NO
  anti-sense: NO
agcatgtgggtatccagc

SEQ ID NO: 9811 - DNA (genomic), 19 bp, Helicobacter pylori; double-stranded, circular
  misc_feature (B) LOCATION 1...19
  hypothetical: NO
  anti-sense: NO
aggttgttgcctaaagact

SEQ ID NO: 9812 - DNA (genomic), 18 bp, Helicobacter pylori; double-stranded, circular
  misc_feature (B) LOCATION 1...18
  hypothetical: NO
  anti-sense: NO
ctgcctccacctttgatc

SEQ ID NO: 9813 - DNA (genomic), 19 bp, Helicobacter pylori; double-stranded, circular
  misc_feature (B) LOCATION 1...19
  hypothetical: NO
  anti-sense: NO
accaatatcaattggcact

SEQ ID NO: 9814 - DNA (genomic), 18 bp, Helicobacter pylori; double-stranded, circular
  misc_feature (B) LOCATION 1...18
  hypothetical: NO
  anti-sense: NO
acttggaaaagctctgca

SEQ ID NO: 9815 - DNA (genomic), 19 bp, Helicobacter pylori; double-stranded, circular
  misc_feature (B) LOCATION 1...19
  hypothetical: NO
  anti-sense: NO
cttgcttgtcatatctagc

SEQ ID NO: 9816 - DNA (genomic), 18 bp, Helicobacter pylori; double-stranded, circular
  misc_feature (B) LOCATION 1...18
  hypothetical: NO
  anti-sense: NO
gttgaagtgttggtgcta

SEQ ID NO: 9817 - DNA (genomic), 22 bp, Helicobacter pylori; double-stranded, circular
  misc_feature (B) LOCATION 1...22
  hypothetical: NO
  anti-sense: NO
caagcaagtggtttggttttag

SEQ ID NO: 9818 - DNA (genomic), 22 bp, Helicobacter pylori; double-stranded, circular
  misc_feature (B) LOCATION 1...22
  hypothetical: NO
  anti-sense: NO
tggaaagagcaaatcattgaag

SEQ ID NO: 9819 - DNA (genomic), 21 bp, Helicobacter pylori; double-stranded, circular
  misc_feature (B) LOCATION 1...21
  hypothetical: NO
  anti-sense: NO
gcccataatcaaaaagcccat

SEQ ID NO: 9820 - DNA (genomic), 24 bp, Helicobacter pylori; double-stranded, circular
  misc_feature (B) LOCATION 1...24
  hypothetical: NO
  anti-sense: NO
ctaaaaccaaaccacttgcttgtc

SEQ ID NO: 9821 - DNA (genomic), 16 bp, Helicobacter pylori; double-stranded, circular
  misc_feature (B) LOCATION 1...16
  hypothetical: NO
  anti-sense: NO
gtaaaacgacggccag

SEQ ID NO: 9822 - DNA (genomic), 17 bp, Helicobacter pylori; double-stranded, circular
  misc_feature (B) LOCATION 1...17
  hypothetical: NO
  anti-sense: NO
caggaaacagctatgac

SEQ ID NO: 9823 - DNA (genomic), 21 bp, Helicobacter pylori; double-stranded, circular
  misc_feature (B) LOCATION 1...21
  hypothetical: NO
  anti-sense: NO
ttgccccatcgtattgataga

SEQ ID NO: 9824 - DNA (genomic), 21 bp, Helicobacter pylori; double-stranded, circular
  misc_feature (B) LOCATION 1...21
  hypothetical: NO
  anti-sense: NO
agagcgtatttcacccgaaag

SEQ ID NO: 9825 - DNA (genomic), 21 bp, Helicobacter pylori; double-stranded, circular
  misc_feature (B) LOCATION 1...21
  hypothetical: NO
  anti-sense: NO
tcttgcatcttaatccactcc

SEQ ID NO: 9826 - DNA (genomic), 21 bp, Helicobacter pylori; double-stranded, circular
  misc_feature (B) LOCATION 1...21
  hypothetical: NO
  anti-sense: NO
cgggtcaaaacgaccacttaa

SEQ ID NO: 9827 - DNA (genomic), 21 bp, Helicobacter pylori; double-stranded, circular
  misc_feature (B) LOCATION 1...21
  hypothetical: NO
  anti-sense: NO
aatccgtttcgctaatttagt

SEQ ID NO: 9828 - DNA (genomic), 21 bp, Helicobacter pylori; double-stranded, circular
  misc_feature (B) LOCATION 1...21
  hypothetical: NO
  anti-sense: NO
aacacttcaatttcctctata

SEQ ID NO: 9829 - DNA (genomic), 21 bp, Helicobacter pylori; double-stranded, circular
  misc_feature (B) LOCATION 1...21
  hypothetical: NO
  anti-sense: NO
tggtataaggatttgaatgga

SEQ ID NO: 9830 - DNA (genomic), 21 bp, Helicobacter pylori; double-stranded, circular
  misc_feature (B) LOCATION 1...21
  hypothetical: NO
  anti-sense: NO
ttgactaaacacatgcgagaa

SEQ ID NO: 9831 - DNA (genomic), 21 bp, Helicobacter pylori; double-stranded, circular
  misc_feature (B) LOCATION 1...21
  hypothetical: NO
  anti-sense: NO
atagagagcgttgtgtttagc

SEQ ID NO: 9832 - DNA (genomic), 21 bp, Helicobacter pylori; double-stranded, circular
  misc_feature (B) LOCATION 1...21
  hypothetical: NO
  anti-sense: NO
cctttattggttttgatcgtg

SEQ ID NO: 9833 - DNA (genomic), 21 bp, Helicobacter pylori; double-stranded, circular
  misc_feature (B) LOCATION 1...21
  hypothetical: NO
  anti-sense: NO
atgtccgttgtctgtatggaa

SEQ ID NO: 9834 - DNA (genomic), 21 bp, Helicobacter pylori; double-stranded, circular
  misc_feature (B) LOCATION 1...21
  hypothetical: NO
  anti-sense: NO
tagggtgtctagggatttgat

SEQ ID NO: 9835 - DNA (genomic), 21 bp, Helicobacter pylori; double-stranded, circular
  misc_feature (B) LOCATION 1...21
  hypothetical: NO
  anti-sense: NO
gcgtttggcttcttcgttgtc

SEQ ID NO: 9836 - DNA (genomic), 21 bp, Helicobacter pylori; double-stranded, circular
  misc_feature (B) LOCATION 1...21
  hypothetical: NO
  anti-sense: NO
gaaatggaaaatagcggtcaa

SEQ ID NO: 9837 - DNA (genomic), 20 bp, Helicobacter pylori; double-stranded, circular
  misc_feature (B) LOCATION 1...20
  hypothetical: NO
  anti-sense: NO
gcaaatccccagccacttcc

SEQ ID NO: 9838 - DNA (genomic), 20 bp, Helicobacter pylori; double-stranded, circular
  misc_feature (B) LOCATION 1...20
  hypothetical: NO
  anti-sense: NO
gtggctaaaaatgagggctt

SEQ ID NO: 9839 - DNA (genomic), 21 bp, Helicobacter pylori; double-stranded, circular
  misc_feature (B) LOCATION 1...21
  hypothetical: NO
  anti-sense: NO
gctaaaacttcatcgctcaat

SEQ ID NO: 9840 - DNA (genomic), 22 bp, Helicobacter pylori; double-stranded, circular
  misc_feature (B) LOCATION 1...22
  hypothetical: NO
  anti-sense: NO
gttaggaaattagaaatcattg

SEQ ID NO: 9841 - DNA (genomic), 21 bp, Helicobacter pylori; double-stranded, circular
  misc_feature (B) LOCATION 1...21
  hypothetical: NO
  anti-sense: NO
gttgggcagaaaataaggtga

SEQ ID NO: 9842 - DNA (genomic), 21 bp, Helicobacter pylori; double-stranded, circular
  misc_feature (B) LOCATION 1...21
  hypothetical: NO
  anti-sense: NO
caaacaaacctgacaagaaac

SEQ ID NO: 9843 - DNA (genomic), 20 bp, Helicobacter pylori; double-stranded, circular
  misc_feature (B) LOCATION 1...20
  hypothetical: NO
  anti-sense: NO
cattgatgcctaaaacttcg

SEQ ID NO: 9844 - DNA (genomic), 20 bp, Helicobacter pylori; double-stranded, circular
  misc_feature (B) LOCATION 1...20
  hypothetical: NO
  anti-sense: NO
cgtggtggttttcccgttag

SEQ ID NO: 9845 - DNA (genomic), 20 bp, Helicobacter pylori; double-stranded, circular
  misc_feature (B) LOCATION 1...20
  hypothetical: NO
  anti-sense: NO
ggggcattgtgtttgttttt

SEQ ID NO: 9846 - DNA (genomic), 20 bp, Helicobacter pylori; double-stranded, circular
  misc_feature (B) LOCATION 1...20
  hypothetical: NO
  anti-sense: NO
tggtctatcatgcgaattat

SEQ ID NO: 9847 - DNA (genomic), 21 bp, Helicobacter pylori; double-stranded, circular
  misc_feature (B) LOCATION 1...21
  hypothetical: NO
  anti-sense: NO
gcgtttggggatttgatgttc

SEQ ID NO: 9848 - DNA (genomic), 20 bp, Helicobacter pylori; double-stranded, circular
  misc_feature (B) LOCATION 1...20
  hypothetical: NO
  anti-sense: NO
cgcgctagaggcttgtaaaa

SEQ ID NO: 9849 - DNA (genomic), 20 bp, Helicobacter pylori; double-stranded, circular
  misc_feature (B) LOCATION 1...20
  hypothetical: NO
  anti-sense: NO
gccctgatccattcccccct

SEQ ID NO: 9850 - DNA (genomic), 20 bp, Helicobacter pylori; double-stranded, circular
  misc_feature (B) LOCATION 1...20
  hypothetical: NO
  anti-sense: NO
aagggcgtttgtttcatctc

SEQ ID NO: 9851 - DNA (genomic), 20 bp, Helicobacter pylori; double-stranded, circular
  misc_feature (B) LOCATION 1...20
  hypothetical: NO
  anti-sense: NO
ggcgttattaagcgacatcg

SEQ ID NO: 9852 - DNA (genomic), 20 bp, Helicobacter pylori; double-stranded, circular
  misc_feature (B) LOCATION 1...20
  hypothetical: NO
  anti-sense: NO
tttcaccggcaattttaggc

SEQ ID NO: 9853 - DNA (genomic), 21 bp, Helicobacter pylori; double-stranded, circular
  misc_feature (B) LOCATION 1...21
  hypothetical: NO
  anti-sense: NO
gcgttttgattctgtctgtta

SEQ ID NO: 9854 - DNA (genomic), 21 bp, Helicobacter pylori; double-stranded, circular
  misc_feature (B) LOCATION 1...21
  hypothetical: NO
  anti-sense: NO
gtaaaaacaccgctaacgcat

SEQ ID NO: 9855 - DNA (genomic), 20 bp, Helicobacter pylori; double-stranded, circular
  misc_feature (B) LOCATION 1...20
  hypothetical: NO
  anti-sense: NO
gcgtgttttctaagggttca

SEQ ID NO: 9856 - DNA (genomic), 20 bp, Helicobacter pylori; double-stranded, circular
  misc_feature (B) LOCATION 1...20
  hypothetical: NO
  anti-sense: NO
ggaattttaacgctcttttt

SEQ ID NO: 9857 - DNA (genomic), 20 bp, Helicobacter pylori; double-stranded, circular
  misc_feature (B) LOCATION 1...20
  hypothetical: NO
  anti-sense: NO
aaatctctgtgggcttagtg

SEQ ID NO: 9858 - DNA (genomic), 20 bp, Helicobacter pylori; double-stranded, circular
  misc_feature (B) LOCATION 1...20
  hypothetical: NO
  anti-sense: NO
aatcaaaaacaagagcgtgg

SEQ ID NO: 9859 - DNA (genomic), 21 bp, Helicobacter pylori; double-stranded, circular
  misc_feature (B) LOCATION 1...21
  hypothetical: NO
  anti-sense: NO
gccccagccccataatacaaa

SEQ ID NO: 9860 - DNA (genomic), 21 bp, Helicobacter pylori; double-stranded, circular
  misc_feature (B) LOCATION 1...21
  hypothetical: NO
  anti-sense: NO
ggagggcgcaattaaacatcg

SEQ ID NO: 9861 - DNA (genomic), 20 bp, Helicobacter pylori; double-stranded, circular
  misc_feature (B) LOCATION 1...20
  hypothetical: NO
  anti-sense: NO
tcacgctttctaaatcatca

SEQ ID NO: 9862 - DNA (genomic), 20 bp, Helicobacter pylori; double-stranded, circular
  misc_feature (B) LOCATION 1...20
  hypothetical: NO
  anti-sense: NO
cgctaatcacatcctttctt

SEQ ID NO: 9863 - DNA (genomic), 20 bp, Helicobacter pylori; double-stranded, circular
  misc_feature (B) LOCATION 1...20
  hypothetical: NO
  anti-sense: NO
tgcccaaaaatccactaacg

SEQ ID NO: 9864 - DNA (genomic), 20 bp, Helicobacter pylori; double-stranded, circular
  misc_feature (B) LOCATION 1...20
  hypothetical: NO
  anti-sense: NO
aacgggtttgacactgatga

SEQ ID NO: 9865 - DNA (genomic), 21 bp, Helicobacter pylori; double-stranded, circular
  misc_feature (B) LOCATION 1...21
  hypothetical: NO
  anti-sense: NO
gaatgcggtggttttagagag

SEQ ID NO: 9866 - DNA (genomic), 21 bp, Helicobacter pylori; double-stranded, circular
  misc_feature (B) LOCATION 1...21
  hypothetical: NO
  anti-sense: NO
gcgtttttaagactgaataca

SEQ ID NO: 9867 - DNA (genomic), 20 bp, Helicobacter pylori; double-stranded, circular
  misc_feature (B) LOCATION 1...20
  hypothetical: NO
  anti-sense: NO
gggcgatgtgattggcgatt

SEQ ID NO: 9868 - DNA (genomic), 20 bp, Helicobacter pylori; double-stranded, circular
  misc_feature (B) LOCATION 1...20
  hypothetical: NO
  anti-sense: NO
ggatagcctgccaaaacgcc

SEQ ID NO: 9869 - DNA (genomic), 20 bp, Helicobacter pylori; double-stranded, circular
  misc_feature (B) LOCATION 1...20
  hypothetical: NO
  anti-sense: NO
aagtttatgcgggcgagatt

SEQ ID NO: 9870 - DNA (genomic), 20 bp, Helicobacter pylori; double-stranded, circular
  misc_feature (B) LOCATION 1...20
  hypothetical: NO
  anti-sense: NO
ggagcaatcagccatttttc

SEQ ID NO: 9871 - DNA (genomic), 20 bp, Helicobacter pylori; double-stranded, circular
  misc_feature (B) LOCATION 1...20
  hypothetical: NO
  anti-sense: NO
ctagcgattcaaggcgatgg

SEQ ID NO: 9872 - DNA (genomic), 20 bp, Helicobacter pylori; double-stranded, circular
  misc_feature (B) LOCATION 1...20
  hypothetical: NO
  anti-sense: NO
cggcctccttcaaacacatt

SEQ ID NO: 9873 - DNA (genomic), 20 bp, Helicobacter pylori; double-stranded, circular
  misc_feature (B) LOCATION 1...20
  hypothetical: NO
  anti-sense: NO
agcgggcagtttaggaccac

SEQ ID NO: 9874 - DNA (genomic), 21 bp, Helicobacter pylori; double-stranded, circular
  misc_feature (B) LOCATION 1...21
  hypothetical: NO
  anti-sense: NO
gcattgatcgcatttttagcc

SEQ ID NO: 9875 - DNA (genomic), 20 bp, Helicobacter pylori; double-stranded, circular
  misc_feature (B) LOCATION 1...20
  hypothetical: NO
  anti-sense: NO
acgggttagcagggcagaat

SEQ ID NO: 9876 - DNA (genomic), 20 bp, Helicobacter pylori; double-stranded, circular
  misc_feature (B) LOCATION 1...20
  hypothetical: NO
  anti-sense: NO
caaaagaggcgggttcatgc

SEQ ID NO: 9877 - DNA (genomic), 20 bp, Helicobacter pylori; double-stranded, circular
  misc_feature (B) LOCATION 1...20
  hypothetical: NO
  anti-sense: NO
tttagaagtcgttgatgaga

SEQ ID NO: 9878 - DNA (genomic), 20 bp, Helicobacter pylori; double-stranded, circular
  misc_feature (B) LOCATION 1...20
  hypothetical: NO
  anti-sense: NO
catacacgctcacttcatcg

SEQ ID NO: 9879 - DNA (genomic), 22 bp, Helicobacter pylori; double-stranded, circular
  misc_feature (B) LOCATION 1...22
  hypothetical: NO
  anti-sense: NO
agtgtggtcgcctgtggtggag

SEQ ID NO: 9880 - DNA (genomic), 22 bp, Helicobacter pylori; double-stranded, circular
  misc_feature (B) LOCATION 1...22
  hypothetical: NO
  anti-sense: NO
cccctaatagtctgtcaatcat

SEQ ID NO: 9881 - DNA (genomic), 22 bp, Helicobacter pylori; double-stranded, circular
  misc_feature (B) LOCATION 1...22
  hypothetical: NO
  anti-sense: NO
caaaagattgaagcagaagagt

SEQ ID NO: 9882 - DNA (genomic), 22 bp, Helicobacter pylori; double-stranded, circular
  misc_feature (B) LOCATION 1...22
  hypothetical: NO
  anti-sense: NO
aatggttttcctatacccttga

SEQ ID NO: 9883 - DNA (genomic), 20 bp, Helicobacter pylori; double-stranded, circular
  misc_feature (B) LOCATION 1...20
  hypothetical: NO
  anti-sense: NO
gagagcaaatccttatccag

SEQ ID NO: 9884 - DNA (genomic), 20 bp, Helicobacter pylori; double-stranded, circular
  misc_feature (B) LOCATION 1...20
  hypothetical: NO
  anti-sense: NO
catacacgctcacttcatcg

SEQ ID NO: 9885 - DNA (genomic), 22 bp, Helicobacter pylori; double-stranded, circular
  misc_feature (B) LOCATION 1...22
  hypothetical: NO
  anti-sense: NO
agtgtggtcgcctgtggtggag

SEQ ID NO: 9886 - DNA (genomic), 22 bp, Helicobacter pylori; double-stranded, circular
  misc_feature (B) LOCATION 1...22
  hypothetical: NO
  anti-sense: NO
cccctaatagtctgtcaatcat

SEQ ID NO: 9887 - DNA (genomic), 22 bp, Helicobacter pylori; double-stranded, circular
  misc_feature (B) LOCATION 1...22
  hypothetical: NO
  anti-sense: NO
caaaagattgaagcagaagagt

SEQ ID NO: 9888 - DNA (genomic), 22 bp, Helicobacter pylori; double-stranded, circular
  misc_feature (B) LOCATION 1...22
  hypothetical: NO
  anti-sense: NO
aatggttttcctatacccttga

SEQ ID NO: 9889 - DNA (genomic), 21 bp, Helicobacter pylori; double-stranded, circular
  misc_feature (B) LOCATION 1...21
  hypothetical: NO
  anti-sense: NO
ttgaaaccccaaaagttttac

SEQ ID NO: 9890 - DNA (genomic), 21 bp, Helicobacter pylori; double-stranded, circular
  misc_feature (B) LOCATION 1...21
  hypothetical: NO
  anti-sense: NO
tcaactgataggtaatatccc

SEQ ID NO: 9891 - DNA (genomic), 21 bp, Helicobacter pylori; double-stranded, circular
  misc_feature (B) LOCATION 1...21
  hypothetical: NO
  anti-sense: NO
gctaggatttatgccaattta

SEQ ID NO: 9892 - DNA (genomic), 21 bp, Helicobacter pylori; double-stranded, circular
  misc_feature (B) LOCATION 1...21
  hypothetical: NO
  anti-sense: NO
tacgagacaaaatagggattt

SEQ ID NO: 9893 - DNA (genomic), 21 bp, Helicobacter pylori; double-stranded, circular
  misc_feature (B) LOCATION 1...21
  hypothetical: NO
  anti-sense: NO
ataggcatgcagaatttttcc

SEQ ID NO: 9894 - DNA (genomic), 17 bp, Helicobacter pylori; double-stranded, circular
  misc_feature (B) LOCATION 1...17
  hypothetical: NO
  anti-sense: NO
ccattacatttcgcctc

SEQ ID NO: 9895 - DNA (genomic), 21 bp, Helicobacter pylori; double-stranded, circular
  misc_feature (B) LOCATION 1...21
  hypothetical: NO
  anti-sense: NO
cgatagatattgtagaagtca

SEQ ID NO: 9896 - DNA (genomic), 21 bp, Helicobacter pylori; double-stranded, circular
  misc_feature (B) LOCATION 1...21
  hypothetical: NO
  anti-sense: NO
gggcttgtattcattttgtaa

SEQ ID NO: 9897 - DNA (genomic), 21 bp, Helicobacter pylori; double-stranded, circular
  misc_feature (B) LOCATION 1...21
  hypothetical: NO
  anti-sense: NO
gttttaaaaacgccatagcca

SEQ ID NO: 9898 - DNA (genomic), 21 bp, Helicobacter pylori; double-stranded, circular
  misc_feature (B) LOCATION 1...21
  hypothetical: NO
  anti-sense: NO
ttctaaaaggtggtaatcttc

SEQ ID NO: 9899 - DNA (genomic), 22 bp, Helicobacter pylori; double-stranded, circular
  misc_feature (B) LOCATION 1...22
  hypothetical: NO
  anti-sense: NO
taagtcaagccataaaaccaaa

SEQ ID NO: 9900 - DNA (genomic), 21 bp, Helicobacter pylori; double-stranded, circular
  misc_feature (B) LOCATION 1...21
  hypothetical: NO
  anti-sense: NO
ttttggggtaaaaaggctgaa

SEQ ID NO: 9901 - DNA (genomic), 21 bp, Helicobacter pylori; double-stranded, circular
  misc_feature (B) LOCATION 1...21
  hypothetical: NO
  anti-sense: NO
atctttttgcccttgctcata

SEQ ID NO: 9902 - DNA (genomic), 21 bp, Helicobacter pylori; double-stranded, circular
  misc_feature (B) LOCATION 1...21
  hypothetical: NO
  anti-sense: NO
agacagcaccagtttgataaa

SEQ ID NO: 9903 - DNA (genomic), 21 bp, Helicobacter pylori; double-stranded, circular
  misc_feature (B) LOCATION 1...21
  hypothetical: NO
  anti-sense: NO
cagccacacttcaatgtctat

SEQ ID NO: 9904 - DNA (genomic), 21 bp, Helicobacter pylori; double-stranded, circular
  misc_feature (B) LOCATION 1...21
  hypothetical: NO
  anti-sense: NO
gtaaggcgttagaaaaatacc

SEQ ID NO: 9905 - DNA (genomic), 21 bp, Helicobacter pylori; double-stranded, circular
  misc_feature (B) LOCATION 1...21
  hypothetical: NO
  anti-sense: NO
gccccattaaaatccttttct

SEQ ID NO: 9906 - DNA (genomic), 17 bp, Helicobacter pylori; double-stranded, circular
  misc_feature (B) LOCATION 1...17
  hypothetical: NO
  anti-sense: NO
aaaggatacaaggggga

SEQ ID NO: 9907 - DNA (genomic), 21 bp, Helicobacter pylori; double-stranded, circular
  misc_feature (B) LOCATION 1...21
  hypothetical: NO
  anti-sense: NO
ctcgctccattttatctttta

SEQ ID NO: 9908 - DNA (genomic), 21 bp, Helicobacter pylori; double-stranded, circular
  misc_feature (B) LOCATION 1...21
  hypothetical: NO
  anti-sense: NO
ttttttagggaggattgagat

SEQ ID NO: 9909 - DNA (genomic), 21 bp, Helicobacter pylori; double-stranded, circular
  misc_feature (B) LOCATION 1...21
  hypothetical: NO
  anti-sense: NO
tgtttggaaatgctggtgatc

SEQ ID NO: 9910 - DNA (genomic), 21 bp, Helicobacter pylori; double-stranded, circular
  misc_feature (B) LOCATION 1...21
  hypothetical: NO
  anti-sense: NO
cttttgggggagtttgacaag

SEQ ID NO: 9911 - DNA (genomic), 21 bp, Helicobacter pylori; double-stranded, circular
  misc_feature (B) LOCATION 1...21
  hypothetical: NO
  anti-sense: NO
tttgataaacgcccacttttt

SEQ ID NO: 9912 - DNA (genomic), 21 bp, Helicobacter pylori; double-stranded, circular
  misc_feature (B) LOCATION 1...21
  hypothetical: NO
  anti-sense: NO
tttcaaaacgctcaccttttg

SEQ ID NO: 9913 - DNA (genomic), 21 bp, Helicobacter pylori; double-stranded, circular
  misc_feature (B) LOCATION 1...21
  hypothetical: NO
  anti-sense: NO
tctattcttttgatgctctct

SEQ ID NO: 9914 - DNA (genomic), 21 bp, Helicobacter pylori; double-stranded, circular
  misc_feature (B) LOCATION 1...21
  hypothetical: NO
  anti-sense: NO
ataatgagtttgatcgttacg

SEQ ID NO: 9915 - DNA (genomic), 21 bp, Helicobacter pylori; double-stranded, circular
  misc_feature (B) LOCATION 1...21
  hypothetical: NO
  anti-sense: NO
acaataataggctttgtcttc

SEQ ID NO: 9916 - DNA (genomic), 21 bp, Helicobacter pylori; double-stranded, circular
  misc_feature (B) LOCATION 1...21
  hypothetical: NO
  anti-sense: NO
aattagcccttaaaatagatg

SEQ ID NO: 9917 - DNA (genomic), 20 bp, Helicobacter pylori; double-stranded, circular
  misc_feature (B) LOCATION 1...20
  hypothetical: NO
  anti-sense: NO
aacaaccgctaaaatcaaac

SEQ ID NO: 9918 - DNA (genomic), 20 bp, Helicobacter pylori; double-stranded, circular
  misc_feature (B) LOCATION 1...20
  hypothetical: NO
  anti-sense: NO
cttcagcgatactaaaagat

SEQ ID NO: 9919 - DNA (genomic), 20 bp, Helicobacter pylori; double-stranded, circular
  misc_feature (B) LOCATION 1...20
  hypothetical: NO
  anti-sense: NO
taggggcgattgaaaacagc

SEQ ID NO: 9920 - DNA (genomic), 20 bp, Helicobacter pylori; double-stranded, circular
  misc_feature (B) LOCATION 1...20
  hypothetical: NO
  anti-sense: NO
gctggataaggatttgctct

SEQ ID NO: 9921 - DNA (genomic), 20 bp, Helicobacter pylori; double-stranded, circular
  misc_feature (B) LOCATION 1...20
  hypothetical: NO
  anti-sense: NO
tttttgggggtatgctaaaa

SEQ ID NO: 9922 - DNA (genomic), 20 bp, Helicobacter pylori; double-stranded, circular
  misc_feature (B) LOCATION 1...20
  hypothetical: NO
  anti-sense: NO
ggctggtaaatactggatag

SEQ ID NO: 9923 - DNA (genomic), 21 bp, Helicobacter pylori; double-stranded, circular
  misc_feature (B) LOCATION 1...21
  hypothetical: NO
  anti-sense: NO
aggctattcaaggtggctaaa

SEQ ID NO: 9924 - DNA (genomic), 22 bp, Helicobacter pylori; double-stranded, circular
  misc_feature (B) LOCATION 1...22
  hypothetical: NO
  anti-sense: NO
attctcatcaacgacttctaaa

SEQ ID NO: 9925 - DNA (genomic), 20 bp, Helicobacter pylori; double-stranded, circular
  misc_feature (B) LOCATION 1...20
  hypothetical: NO
  anti-sense: NO
gcagttggcggtatttggtg

SEQ ID NO: 9926 - DNA (genomic), 20 bp, Helicobacter pylori; double-stranded, circular
  misc_feature (B) LOCATION 1...20
  hypothetical: NO
  anti-sense: NO
gagagcgaagtttatgagaa

SEQ ID NO: 9927 - DNA (genomic), 20 bp, Helicobacter pylori; double-stranded, circular
  misc_feature (B) LOCATION 1...20
  hypothetical: NO
  anti-sense: NO
tgattgttgggtagctctca

SEQ ID NO: 9928 - DNA (genomic), 21 bp, Helicobacter pylori; double-stranded, circular
  misc_feature (B) LOCATION 1...21
  hypothetical: NO
  anti-sense: NO
aaaatcggtctgatgctctta

SEQ ID NO: 9929 - DNA (genomic), 20 bp, Helicobacter pylori; double-stranded, circular
  misc_feature (B) LOCATION 1...20
  hypothetical: NO
  anti-sense: NO
cttttcctttcgcttgaaga

SEQ ID NO: 9930 - DNA (genomic), 20 bp, Helicobacter pylori; double-stranded, circular
  misc_feature (B) LOCATION 1...20
  hypothetical: NO
  anti-sense: NO
aaaacaaacgcatcaaaaat

SEQ ID NO: 9931 - DNA (genomic), 20 bp, Helicobacter pylori; double-stranded, circular
  misc_feature (B) LOCATION 1...20
  hypothetical: NO
  anti-sense: NO
cgcccgaatggatgagtagg

SEQ ID NO: 9932 - DNA (genomic), 21 bp, Helicobacter pylori; double-stranded, circular
  misc_feature (B) LOCATION 1...21
  hypothetical: NO
  anti-sense: NO
tgatgcaacaaatggacgaca

SEQ ID NO: 9933 - DNA (genomic), 21 bp, Helicobacter pylori; double-stranded, circular
  misc_feature (B) LOCATION 1...21
  hypothetical: NO
  anti-sense: NO
gggattttagaatacttttgc

SEQ ID NO: 9934 - DNA (genomic), 20 bp, Helicobacter pylori; double-stranded, circular
  misc_feature (B) LOCATION 1...20
  hypothetical: NO
  anti-sense: NO
caagcggcaagtggaagata

SEQ ID NO: 9935 - DNA (genomic), 21 bp, Helicobacter pylori; double-stranded, circular
  misc_feature (B) LOCATION 1...21
  hypothetical: NO
  anti-sense: NO
tttttaagggcgtatttttgt

SEQ ID NO: 9936 - DNA (genomic), 21 bp, Helicobacter pylori; double-stranded, circular
  misc_feature (B) LOCATION 1...21
  hypothetical: NO
  anti-sense: NO
tgggttttaaggaatgtgatg

SEQ ID NO: 9937 - DNA (genomic), 20 bp, Helicobacter pylori; double-stranded, circular
  misc_feature (B) LOCATION 1...20
  hypothetical: NO
  anti-sense: NO
cgcgctcaaaatccctaaat

SEQ ID NO: 9938 - DNA (genomic), 20 bp, Helicobacter pylori; double-stranded, circular
  misc_feature (B) LOCATION 1...20
  hypothetical: NO
  anti-sense: NO
ggcccattctttcggatatt

SEQ ID NO: 9939 - DNA (genomic), 20 bp, Helicobacter pylori; double-stranded, circular
  misc_feature (B) LOCATION 1...20
  hypothetical: NO
  anti-sense: NO
gccccattcctgtttttagc

SEQ ID NO: 9940 - DNA (genomic), 20 bp, Helicobacter pylori; double-stranded, circular
  misc_feature (B) LOCATION 1...20
  hypothetical: NO
  anti-sense: NO
cgctttaacgctcctttcac

SEQ ID NO: 9941 - DNA (genomic), 21 bp, Helicobacter pylori; double-stranded, circular
  misc_feature (B) LOCATION 1...21
  hypothetical: NO
  anti-sense: NO
agcgtttttgtaagggggtat

SEQ ID NO: 9942 - DNA (genomic), 21 bp, Helicobacter pylori; double-stranded, circular
  misc_feature (B) LOCATION 1...21
  hypothetical: NO
  anti-sense: NO
tccctatcatagcgttagtgc

SEQ ID NO: 9943 - DNA (genomic), 21 bp, Helicobacter pylori; double-stranded, circular
  misc_feature (B) LOCATION 1...21
  hypothetical: NO
  anti-sense: NO
cttaggggtttttagcatgaa

SEQ ID NO: 9944 - DNA (genomic), 20 bp, Helicobacter pylori; double-stranded, circular
  misc_feature (B) LOCATION 1...20
  hypothetical: NO
  anti-sense: NO
gcacaattcccacacgctgc

SEQ ID NO: 9945 - DNA (genomic), 21 bp, Helicobacter pylori; double-stranded, circular
  misc_feature (B) LOCATION 1...21
  hypothetical: NO
  anti-sense: NO
ccaaagctaaagcggtgtttt

SEQ ID NO: 9946 - DNA (genomic), 23 bp, Helicobacter pylori; double-stranded, circular
  misc_feature (B) LOCATION 1...23
  hypothetical: NO
  anti-sense: NO
gctcatggatataaaggggtatt

SEQ ID NO: 9947 - DNA (genomic), 20 bp, Helicobacter pylori; double-stranded, circular
  misc_feature (B) LOCATION 1...20
  hypothetical: NO
  anti-sense: NO
cttagcccctttagtgttta

SEQ ID NO: 9948 - DNA (genomic), 20 bp, Helicobacter pylori; double-stranded, circular
  misc_feature (B) LOCATION 1...20
  hypothetical: NO
  anti-sense: NO
cgcaaaagggtaggggataa

SEQ ID NO: 9949 - DNA (genomic), 21 bp, Helicobacter pylori; double-stranded, circular
  misc_feature (B) LOCATION 1...21
  hypothetical: NO
  anti-sense: NO
ttttatttttagaaacgaatc

SEQ ID NO: 9950 - DNA (genomic), 20 bp, Helicobacter pylori; double-stranded, circular
  misc_feature (B) LOCATION 1...20
  hypothetical: NO
  anti-sense: NO
caaacttatcgccctctcta

SEQ ID NO: 9951 - DNA (genomic), 23 bp, Helicobacter pylori; double-stranded, circular
  misc_feature (B) LOCATION 1...23
  hypothetical: NO
  anti-sense: NO
aaagataacgctaggatttctac

SEQ ID NO: 9952 - DNA (genomic), 23 bp, Helicobacter pylori; double-stranded, circular
  misc_feature (B) LOCATION 1...23
  hypothetical: NO
  anti-sense: NO
taattctacagagtggttaatgg

SEQ ID NO: 9953 - DNA (genomic), 20 bp, Helicobacter pylori; double-stranded, circular
  misc_feature (B) LOCATION 1...20
  hypothetical: NO
  anti-sense: NO
gcggtcatggaatttttaga

SEQ ID NO: 9954 - DNA (genomic), 22 bp, Helicobacter pylori; double-stranded, circular
  misc_feature (B) LOCATION 1...22
  hypothetical: NO
  anti-sense: NO
attcaaagaaagctggctgtct

SEQ ID NO: 9955 - DNA (genomic), 20 bp, Helicobacter pylori; double-stranded, circular
  misc_feature (B) LOCATION 1...20
  hypothetical: NO
  anti-sense: NO
gcttgtgggggttgttttat

SEQ ID NO: 9956 - DNA (genomic), 20 bp, Helicobacter pylori; double-stranded, circular
  misc_feature (B) LOCATION 1...20
  hypothetical: NO
  anti-sense: NO
gaaccccctaaaatgacaat

SEQ ID NO: 9957 - DNA (genomic), 21 bp, Helicobacter pylori; double-stranded, circular
  misc_feature (B) LOCATION 1...21
  hypothetical: NO
  anti-sense: NO
accatgctcattaacgctagg

SEQ ID NO: 9958 - DNA (genomic), 21 bp, Helicobacter pylori; double-stranded, circular
  misc_feature (B) LOCATION 1...21
  hypothetical: NO
  anti-sense: NO
gtaagtttgagcggctaattc

SEQ ID NO: 9959 - DNA (genomic), 21 bp, Helicobacter pylori; double-stranded, circular
  misc_feature (B) LOCATION 1...21
  hypothetical: NO
  anti-sense: NO
aaaaagaaagaagaactcgtg

SEQ ID NO: 9960 - DNA (genomic), 21 bp, Helicobacter pylori; double-stranded, circular
  misc_feature (B) LOCATION 1...21
  hypothetical: NO
  anti-sense: NO
aaagatactcccctgtgatta

SEQ ID NO: 9961 - DNA (genomic), 20 bp, Helicobacter pylori; double-stranded, circular
  misc_feature (B) LOCATION 1...20
  hypothetical: NO
  anti-sense: NO
caaagaaacgcaaaatacag

SEQ ID NO: 9962 - DNA (genomic), 20 bp, Helicobacter pylori; double-stranded, circular
  misc_feature (B) LOCATION 1...20
  hypothetical: NO
  anti-sense: NO
gcatggtattcagcgttttc

SEQ ID NO: 9963 - DNA (genomic), 21 bp, Helicobacter pylori; double-stranded, circular
  misc_feature (B) LOCATION 1...21
  hypothetical: NO
  anti-sense: NO
gcagcggcacagcgactttag

SEQ ID NO: 9964 - DNA (genomic), 21 bp, Helicobacter pylori; double-stranded, circular
  misc_feature (B) LOCATION 1...21
  hypothetical: NO
  anti-sense: NO
cgcccccaaaaagtcgcagta

SEQ ID NO: 9965 - DNA (genomic), 22 bp, Helicobacter pylori; double-stranded, circular
  misc_feature (B) LOCATION 1...22
  hypothetical: NO
  anti-sense: NO
aaaggtttgaaacaagaaatct

SEQ ID NO: 9966 - DNA (genomic), 21 bp, Helicobacter pylori; double-stranded, circular
  misc_feature (B) LOCATION 1...21
  hypothetical: NO
  anti-sense: NO
cacttgagcgttagcaacaat

SEQ ID NO: 9967 - DNA (genomic), 21 bp, Helicobacter pylori; double-stranded, circular
  misc_feature (B) LOCATION 1...21
  hypothetical: NO
  anti-sense: NO
ggggtgtttgaaattgataga

SEQ ID NO: 9968 - DNA (genomic), 21 bp, Helicobacter pylori; double-stranded, circular
  misc_feature (B) LOCATION 1...21
  hypothetical: NO
  anti-sense: NO
cgctaggagaaaggaaggaaa

SEQ ID NO: 9969 - DNA (genomic), 21 bp, Helicobacter pylori; double-stranded, circular
  misc_feature (B) LOCATION 1...21
  hypothetical: NO
  anti-sense: NO
caagggcgttttttggggtat

SEQ ID NO: 9970 - DNA (genomic), 21 bp, Helicobacter pylori; double-stranded, circular
  misc_feature (B) LOCATION 1...21
  hypothetical: NO
  anti-sense: NO
gggattgttacaggaaaagat

SEQ ID NO: 9971 - DNA (genomic), 21 bp, Helicobacter pylori; double-stranded, circular
  misc_feature (B) LOCATION 1...21
  hypothetical: NO
  anti-sense: NO
ggaatacaataacgcataaat

SEQ ID NO: 9972 - DNA (genomic), 21 bp, Helicobacter pylori; double-stranded, circular
  misc_feature (B) LOCATION 1...21
  hypothetical: NO
  anti-sense: NO
gcctttttagacaaccctact

SEQ ID NO: 9973 - DNA (genomic), 21 bp, Helicobacter pylori; double-stranded, circular
  misc_feature (B) LOCATION 1...21
  hypothetical: NO
  anti-sense: NO
cccctaaactcaaatctcaat

SEQ ID NO: 9974 - DNA (genomic), 21 bp, Helicobacter pylori; double-stranded, circular
  misc_feature (B) LOCATION 1...21
  hypothetical: NO
  anti-sense: NO
gctagaaatgccatgagaaag

SEQ ID NO: 9975 - DNA (genomic), 21 bp, Helicobacter pylori; double-stranded, circular
  misc_feature (B) LOCATION 1...21
  hypothetical: NO
  anti-sense: NO
gcgattatggggtatttattg

SEQ ID NO: 9976 - DNA (genomic), 21 bp, Helicobacter pylori; double-stranded, circular
  misc_feature (B) LOCATION 1...21
  hypothetical: NO
  anti-sense: NO
ttattgtggagttgcttgtca

SEQ ID NO: 9977 - DNA (genomic), 21 bp, Helicobacter pylori; double-stranded, circular
  misc_feature (B) LOCATION 1...21
  hypothetical: NO
  anti-sense: NO
tatgcggctcatcctattaaa

SEQ ID NO: 9978 - DNA (genomic), 21 bp, Helicobacter pylori; double-stranded, circular
  misc_feature (B) LOCATION 1...21
  hypothetical: NO
  anti-sense: NO
ccctaaatccaaatcaagcag

SEQ ID NO: 9979 - DNA (genomic), 21 bp, Helicobacter pylori; double-stranded, circular
  misc_feature (B) LOCATION 1...21
  hypothetical: NO
  anti-sense: NO
ccccctaaccccataataccg

SEQ ID NO: 9980 - DNA (genomic), 21 bp, Helicobacter pylori; double-stranded, circular
  misc_feature (B) LOCATION 1...21
  hypothetical: NO
  anti-sense: NO
caaacgatagaaacaaatacg

SEQ ID NO: 9981 - DNA (genomic), 21 bp, Helicobacter pylori; double-stranded, circular
  misc_feature (B) LOCATION 1...21
  hypothetical: NO
  anti-sense: NO
tccagcttgaaatccaaatcc

SEQ ID NO: 9982 - DNA (genomic), 23 bp, Helicobacter pylori; double-stranded, circular
  misc_feature (B) LOCATION 1...23
  hypothetical: NO
  anti-sense: NO
ggtggtgattaaaaaccttattg

SEQ ID NO: 9983 - DNA (genomic), 21 bp, Helicobacter pylori; double-stranded, circular
  misc_feature (B) LOCATION 1...21
  hypothetical: NO
  anti-sense: NO
tttggttgcttggtttgatag

SEQ ID NO: 9984 - DNA (genomic), 21 bp, Helicobacter pylori; double-stranded, circular
  misc_feature (B) LOCATION 1...21
  hypothetical: NO
  anti-sense: NO
ttttgacagacgatgacagaa

SEQ ID NO: 9985 - DNA (genomic), 21 bp, Helicobacter pylori; double-stranded, circular
  misc_feature (B) LOCATION 1...21
  hypothetical: NO
  anti-sense: NO
tttgagggtgcttattttact

SEQ ID NO: 9986 - DNA (genomic), 20 bp, Helicobacter pylori; double-stranded, circular
  misc_feature (B) LOCATION 1...20
  hypothetical: NO
  anti-sense: NO
tggttttacccgccccatta

SEQ ID NO: 9987 - DNA (genomic), 23 bp, Helicobacter pylori; double-stranded, circular
  misc_feature (B) LOCATION 1...23
  hypothetical: NO
  anti-sense: NO
attttgattggttttgatattca

SEQ ID NO: 9988 - DNA (genomic), 23 bp, Helicobacter pylori; double-stranded, circular
  misc_feature (B) LOCATION 1...23
  hypothetical: NO
  anti-sense: NO
cgctttttttctttaacctcttc

SEQ ID NO: 9989 - DNA (genomic), 21 bp, Helicobacter pylori; double-stranded, circular
  misc_feature (B) LOCATION 1...21
  hypothetical: NO
  anti-sense: NO
aagattacgcccccaccttta

SEQ ID NO: 9990 - DNA (genomic), 21 bp, Helicobacter pylori; double-stranded, circular
  misc_feature (B) LOCATION 1...21
  hypothetical: NO
  anti-sense: NO
cgcttttttatgctgttttaa

SEQ ID NO: 9991 - DNA (genomic), 21 bp, Helicobacter pylori; double-stranded, circular
  misc_feature (B) LOCATION 1...21
  hypothetical: NO
  anti-sense: NO
aatacgcttgaatatgttcat

SEQ ID NO: 9992 - DNA (genomic), 21 bp, Helicobacter pylori; double-stranded, circular
  misc_feature (B) LOCATION 1...21
  hypothetical: NO
  anti-sense: NO
tccaccatgtttccgctgatt

SEQ ID NO: 9993 - DNA (genomic), 20 bp, Helicobacter pylori; double-stranded, circular
  misc_feature (B) LOCATION 1...20
  hypothetical: NO
  anti-sense: NO
cacttgttcgctgtcaatag

SEQ ID NO: 9994 - DNA (genomic), 20 bp, Helicobacter pylori; double-stranded, circular
  misc_feature (B) LOCATION 1...20
  hypothetical: NO
  anti-sense: NO
gacttgccattaggtaggaa

SEQ ID NO: 9995 - DNA (genomic), 22 bp, Helicobacter pylori; double-stranded, circular
  misc_feature (B) LOCATION 1...22
  hypothetical: NO
  anti-sense: NO
cccactttaagctcacgagtga

SEQ ID NO: 9996 - DNA (genomic), 22 bp, Helicobacter pylori; double-stranded, circular
  misc_feature (B) LOCATION 1...22
  hypothetical: NO
  anti-sense: NO
caagcagtaaaaatgaaactat

SEQ ID NO: 9997 - DNA (genomic), 21 bp, Helicobacter pylori; double-stranded, circular
  misc_feature (B) LOCATION 1...21
  hypothetical: NO
  anti-sense: NO
gctttttagcgtcatagatat

SEQ ID NO: 9998 - DNA (genomic), 21 bp, Helicobacter pylori; double-stranded, circular
  misc_feature (B) LOCATION 1...21
  hypothetical: NO
  anti-sense: NO
ataaggttttgtttgcggtag

SEQ ID NO: 9999 - DNA (genomic), 23 bp, Helicobacter pylori; double-stranded, circular
  misc_feature (B) LOCATION 1...23
  hypothetical: NO
  anti-sense: NO
ctcttgttgtattcaatgaaact

SEQ ID NO: 10000 - DNA (genomic), 21 bp, Helicobacter pylori; double-stranded, circular
  misc_feature (B) LOCATION 1...21
  hypothetical: NO
  anti-sense: NO
cattcgggttattttgactat

SEQ ID NO: 10001 - DNA (genomic), 23 bp, Helicobacter pylori; double-stranded, circular
  misc_feature (B) LOCATION 1...23
  hypothetical: NO
  anti-sense: NO
taggacttcataactttcatcat

SEQ ID NO: 10002 - DNA (genomic), 22 bp, Helicobacter pylori; double-stranded, circular
  misc_feature (B) LOCATION 1...22
  hypothetical: NO
  anti-sense: NO
tttatccaaatcatctctcaag

SEQ ID NO: 10003 - DNA (genomic), 21 bp, Helicobacter pylori; double-stranded, circular
  misc_feature (B) LOCATION 1...21
  hypothetical: NO
  anti-sense: NO
ttctattcgcctaaaacctac

SEQ ID NO: 10004 - DNA (genomic), 21 bp, Helicobacter pylori; double-stranded, circular
  misc_feature (B) LOCATION 1...21
  hypothetical: NO
  anti-sense: NO
atcaattttcagccctaacta

SEQ ID NO: 10005 - DNA (genomic), 20 bp, Helicobacter pylori; double-stranded, circular
  misc_feature (B) LOCATION 1...20
  hypothetical: NO
  anti-sense: NO
cgggccaaaattagacagcc

SEQ ID NO: 10006 - DNA (genomic), 20 bp, Helicobacter pylori; double-stranded, circular
  misc_feature (B) LOCATION 1...20
  hypothetical: NO
  anti-sense: NO
cggtaaaagcgttcgcatcc

SEQ ID NO: 10007 - DNA (genomic), 23 bp, Helicobacter pylori; double-stranded, circular
  misc_feature (B) LOCATION 1...23
  hypothetical: NO
  anti-sense: NO
ttctggtggtttagctcgtttgg

SEQ ID NO: 10008 - DNA (genomic), 22 bp, Helicobacter pylori; double-stranded, circular
  misc_feature (B) LOCATION 1...22
  hypothetical: NO
  anti-sense: NO
cccatcccacccctagagatcc

SEQ ID NO: 10009 - DNA (genomic), 20 bp, Helicobacter pylori; double-stranded, circular
  misc_feature (B) LOCATION 1...20
  hypothetical: NO
  anti-sense: NO
ctcgttacagcagcgtgaaa

SEQ ID NO: 10010 - DNA (genomic), 20 bp, Helicobacter pylori; double-stranded, circular
  misc_feature (B) LOCATION 1...20
  hypothetical: NO
  anti-sense: NO
gaatgccatattcttgtagc

SEQ ID NO: 10011 - DNA (genomic), 20 bp, Helicobacter pylori; double-stranded, circular
  misc_feature (B) LOCATION 1...20
  hypothetical: NO
  anti-sense: NO
cgggtttaatggcgttgttt

SEQ ID NO: 10012 - DNA (genomic), 20 bp, Helicobacter pylori; double-stranded, circular
  misc_feature (B) LOCATION 1...20
  hypothetical: NO
  anti-sense: NO
ctaacgcccctaaagtgcca

SEQ ID NO: 10013 - DNA (genomic), 20 bp, Helicobacter pylori; double-stranded, circular
  misc_feature (B) LOCATION 1...20
  hypothetical: NO
  anti-sense: NO
cgaacatgcttttagattac

SEQ ID NO: 10014 - DNA (genomic), 20 bp, Helicobacter pylori; double-stranded, circular
  misc_feature (B) LOCATION 1...20
  hypothetical: NO
  anti-sense: NO
ggctctgttctcatcaatag

SEQ ID NO: 10015 - DNA (genomic), 21 bp, Helicobacter pylori; double-stranded, circular
  misc_feature (B) LOCATION 1...21
  hypothetical: NO
  anti-sense: NO
atcttacctatcacctcaaat

SEQ ID NO: 10016 - DNA (genomic), 21 bp, Helicobacter pylori; double-stranded, circular
  misc_feature (B) LOCATION 1...21
  hypothetical: NO
  anti-sense: NO
agacagcaacatctttgtgaa

SEQ ID NO: 10017 - DNA (genomic), 29 bp, Helicobacter pylori; double-stranded, circular
  misc_feature (B) LOCATION 1...29
  hypothetical: NO
  anti-sense: NO
aaatagtcatatgaaaataggcgtttttg

SEQ ID NO: 10018 - DNA (genomic), 28 bp, Helicobacter pylori; double-stranded, circular
  misc_feature (B) LOCATION 1...28
  hypothetical: NO
  anti-sense: NO
agaattctattacaatttgagccattct

SEQ ID NO: 10019 - DNA (genomic), 26 bp, Helicobacter pylori; double-stranded, circular
  misc_feature (B) LOCATION 1...26
  hypothetical: NO
  anti-sense: NO
gcgaattcgatcagaattttttttct

SEQ ID NO: 10020 - DNA (genomic), 26 bp, Helicobacter pylori; double-stranded, circular
  misc_feature (B) LOCATION 1...26
  hypothetical: NO
  anti-sense: NO
ataagtacttgtgaatcttatactag

SEQ ID NO: 10021 - DNA (genomic), 39 bp, Helicobacter pylori; double-stranded, circular
  misc_feature (B) LOCATION 1...39
  hypothetical: NO
  anti-sense: NO
gccatatgcttgaaaccccaaaagttttactcaaaaacc

SEQ ID NO: 10022 - DNA (genomic), 30 bp, Helicobacter pylori; double-stranded, circular
  misc_feature (B) LOCATION 1...30
  hypothetical: NO
  anti-sense: NO
gcgaattcgctcgctcctataatccctacg

SEQ ID NO: 10023 - DNA (genomic), 31 bp, Helicobacter pylori; double-stranded, circular
  misc_feature (B) LOCATION 1...31
  hypothetical: NO
  anti-sense: NO
aaacatatgaagacttataatgtcgctattg

SEQ ID NO: 10024 - DNA (genomic), 30 bp, Helicobacter pylori; double-stranded, circular
  misc_feature (B) LOCATION 1...30
  hypothetical: NO
  anti-sense: NO
tttggatcctttaagcaagctcaagcgttc

SEQ ID NO: 10025 - DNA (genomic), 33 bp, Helicobacter pylori; double-stranded, circular
  misc_feature (B) LOCATION 1...33
  hypothetical: NO
  anti-sense: NO
aaaggtaccatgaaaaatgttggttttatcggc

SEQ ID NO: 10026 - DNA (genomic), 29 bp, Helicobacter pylori; double-stranded, circular
  misc_feature (B) LOCATION 1...29
  hypothetical: NO
  anti-sense: NO
ccagaattcatgaataaagattacgccag

SEQ ID NO: 10027 - DNA (genomic), 31 bp, Helicobacter pylori; double-stranded, circular
  misc_feature (B) LOCATION 1...31
  hypothetical: NO
  anti-sense: NO
cgggatccgaaggtgatggtgtttatatagg

SEQ ID NO: 10028 - DNA (genomic), 32 bp, Helicobacter pylori; double-stranded, circular
  misc_feature (B) LOCATION 1...32
  hypothetical: NO
  anti-sense: NO
cgcatatggaaggtgatggtgtttatataggg

SEQ ID NO: 10029 - DNA (genomic), 37 bp, Helicobacter pylori; double-stranded, circular
  misc_feature (B) LOCATION 1...37
  hypothetical: NO
  anti-sense: NO
gcgaattctcactctttccaatagtttgctgcagagc

SEQ ID NO: 10030 - DNA (genomic), 37 bp, Helicobacter pylori; double-stranded, circular
  misc_feature (B) LOCATION 1...37
  hypothetical: NO
  anti-sense: NO
ccggaattcttaatcccgtttcaaatggtaataaagg

SEQ ID NO: 10031 - DNA (genomic), 36 bp, Helicobacter pylori; double-stranded, circular
  misc_feature (B) LOCATION 1...36
  hypothetical: NO
  anti-sense: NO
gcgaattcccttttatttaaaaagtgtagttatacc
